(19) United States
(12) Patent Application Publication
(10) Pub. No.: US 2026/0034229 A1
(43) Pub. Date: Feb. 5, 2026

(54) ANTIBODY-TARGETED ENZYMATIC CHEMOPROTECTION

(71) Applicant: THE UNIVERSITY OF CHICAGO, Chicago, IL (US)

(72) Inventors: Savas TAY, Burr Ridge, IL (US); Jonathan MATTHEWS, Chicago, IL (US); Betul CELIKER, Chicago, IL (US)

(21) Appl. No.: 19/361,810

(22) Filed: Oct. 17, 2025

Related U.S. Application Data
(63) Continuation-in-part of application No. PCT/US2024/025502, filed on Apr. 19, 2024.
(60) Provisional application No. 63/497,104, filed on Apr. 19, 2023.

(51) Int. Cl. A61K 47/68; A61K 38/50; A61P 39/00; C07K 16/28

(52) U.S. Cl. CPC A61K 47/6815; A61K 38/50; A61K 47/6849; A61K 47/6889; A61P 39/00; C07K 16/2803; C07K 16/2896; C12Y 305/04005

(57) ABSTRACT

Aspects of the disclosure relate to compositions and methods for reducing toxicity of a cytotoxic agent comprising administering an antigen-binding protein conjugated to a protection molecule.

[0001] This application is a continuation in-part of International Application No. PCT/US2024/025502, filed Apr. 19, 2024, which claims priority of U.S. Provisional Application No. 63/467,104 filed Apr. 19, 2023, which is hereby incorporated by reference in its entirety.

[0002] This invention was made with government support under HD007009 awarded by the National Institutes of Health. The government has certain rights in the invention.

### SEQUENCE LISTING

[0003] The instant application contains a Sequence Listing which has been submitted in XML format and is hereby incorporated by reference in its entirety. Said XML copy, created on Oct. 16, 2025, is named ARCDP0801USCIP.xml and is 1,544,632 bytes in size.

### BACKGROUND OF THE INVENTION

### 1. Field of the Invention

[0004] This invention relates to the field of molecular biology and medicine.

### 2. Background

[0005] Chemotherapy is an approach to cancer treatment that kills or blocks the growth of malignant cells with drugs that damage DNA and interrupt the cell cycle. While chemotherapy is a first-line treatment for many types of cancer, it also affects noncancerous cells, causing a range of adverse side-effects in patients, including hair follicle growth inhibition, gastrointestinal tract damage, peripheral neuropathy, and myelosuppression. These effects can be crippling and life-threatening, which limits the dosage of chemotherapy that is tolerable by cancer patients. As such, chemotherapeutic drugs must be administered within a narrow therapeutic window: at a dose sufficient to eliminate the cancer, but not so much as to excessively harm the patient (FIG. 1A). The therapeutic window is a criticial parameter of treatment, as ineffective therapy may leave behind a subset of malignant cells that will proliferate into recurrent (and often treatment-resistant) cancer.

[0006] To address this challenge, the modern strategy of targeted therapy uses molecules that interact with specific types of cells and cellular processes, with far fewer effects on other tissues. A major category is the use of monoclonal antibodies to selectively bind to proteins that are overexpressed on cancer cells, bringing along attached cytotoxic agents or triggering destruction by the immune system. This approach directs the effects of therapy towards cancer cells, decreasing toxicity. At the same time, however, the efficacy of targeted therapies are more constrained than their cytotoxic counterparts. Many malignant tumors do not exhibit targetable disease markers, and those that do often exhibit markers heterogeneously or at low levels. Targeted chemotherapy has the benefit of lower toxicity, albeit at the cost of limited efficacy, and so the therapeutic window is still relatively narrow.

[0007] The idea of using cytidine deaminases (CDA) to protect HSPCs from gemcitabine has been reported in literature before, with multiple papers overexpressing CDA in HSPCs. Lachmann et. al. 2013 gives a comprehensive review on all literature up to 2013 that has overexpressed CDA by either retroviral, plasmid, and lentiviral methods in cell lines (including fibroblast and hematopoetic cell lines), and in primary bone marrow cells and hematopoietic stem cells obtained from mice and humans. These papers show that CDA overexpression confers resistance against gemcitabine and other cytidine/deoxycytidine chemotherapy drugs such as ara-cytabine and decitabine.

[0008] Previous antibody or antibody fragment to enzyme conjugates exist such as antibody-directed enzyme prodrug therapy (ADEPT), targeted enzyme replacement fusions and neuroprotective protein fusions (Silver et. al. 2021). Out of these, ADEPT has been used for cancer treatment in which a bacterial enzyme that is known to convert a prodrug into its cytotoxic active form is delivered specifically to tumors via the conjugate where the activation happens extracellularly. The only successful ADEPT in clinical trials uses a bacterial enzyme, CPG2, and most efforts focus on optimizing this enzyme or finding alternatives that are less immunogenic (Sharma & Bagshawe, 2017). As such, there is a need in the art for new protein conjugates capable of altering the activity of chemotherapeutic agents.

### SUMMARY OF THE INVENTION

[0009] In general, the disclosure relates to the discovery of antigen-binding proteins conjugated to protection molecules to maintain both binding capacity and protection capacity. The antigen-binding proteins conjugated to protection molecules can be used to decrease the cytotoxic effects of a cytotoxic agent.

[0010] Certain aspects relate to compositions comprising an antigen-binding protein conjugated to a protection molecule. The protection molecule may be a molecule that is capable of neutralizing a cytotoxic agent. The protection molecule may neutralize the cytotoxic agent by any method, including enzymatic inactivation, degradation, sequestration, or otherwise acting as an antidote to the cytotoxic agent. The protection molecule may neturalize the cytotoxic agent by reducing the cytotoxic effects of the cytotoxic agent, including by providing an antidote. The protection molecule may induce cellular changes, such as signalling, gene expression, or protein-modifications, that reduce the cytotoxic effect of the cytotoxic agent. The protection molecule can be an cytotoxic agent-binding protein, including an antibody, or fragment thereof, that binds to the cytotoxic agent and/or an enzyme that binds to and neutralizes the cytotoxic agent. In certain aspects, the antigen-binding protein is an antibody or functional fragment thereof.

[0011] Disclosed herein are antigen-binding proteins capable of binding to an antigen on a healthy cell. The healthy cell may be a rapidly dividing cell. The healthy cell may be a gastrointestinal cell, a bone marrow cell, an endothelial cell, a progenitor cell, a dermal cell, a cardiac cell, a liver cell, a kidney cell, a lung cell, an immune cell, a nervous system cell, and/or a mucosal cell. The healthy cell may be a cell that is affected by a cytotoxic agent, including any cytotoxic agent disclosed herein.

[0012] In certain aspects, the antigen-binding protein is capable of binding CD34. Antigen-binding proteins capable of binding CD34 are known in the art. In some aspects, the antigen-binding protein comprises one or more CDRs and/or a heavy chain and a light chain from an antibody known in the art to bind CD34. In certain aspects, the antigen-binding protein is capable of binding CD117. Antigen-binding proteins capable of binding CD117 are known in the art. In some aspects, the antigen-binding protein comprises one or more CDRs and/or a heavy chain and a light chain from an antibody known in the art to bind CD117, including those described in PCT Publication No. WO2020219775A1, which is hereby incorporated by reference in its entirety. In certain aspects, the antigen-binding protein is not capable of binding CD34. In certain aspects, the antigen-binding protein is not capable of binding CD117. In some aspects, the antigen-binding protein comprises one or more heavy chains disclosed in Table 1. In some aspects, the antigen-binding protein comprises one or more light chains disclosed in Table 1. In some aspects, the antigen-binding protein comprises a heavy chain disclosed in Table 1 and a light chain from the same antibody clone in Table 1. In some aspects, the antigen-binding protein comprises a heavy chain disclosed in Table 1 and a light chain from a different antibody clone in Table 1. Also disclosed are antigen-binding protein-cytidine deaminase conjugates comprising an amino acid sequence disclosed in Table 5.

[0013] Disclosed herein are antigen-binding proteins conjugated to protection molecules, where the protection molecules are enzymes. In certain aspects, the protection molecule may comprise a molecule capable of neutralizing gemcitabine. The protection molecule may be a cytidine deaminase. In some aspects, the cytidine deaminase comprises an amino acid sequence disclosed in Table 3. In certain aspects, the antigen-binding protein does not comprise one or more regions typically present on an antibody. The antigen-binding protein may or may not have an Fc region.

[0014] Also disclosed are proteins comprising an antigen-binding protein and a protection molecule. In some aspects, the protein comprises a sequence disclosed in Table 5. In some aspects, the protein comprises or does not comprise a purification tag. In some aspects, the purification tag is a 6×histidine tag. In some aspects, the 6×histidine tag comprises the sequence disclosed in Table 4.

[0015] Also disclosed herein are nucleic acids encoding for one or more proteins described herein. The nucleic acids can include one or more of the nucleic acids disclosed in Tables 1-4.

[0016] Disclosed herein are antigen-binding proteins conjugated to protection molecules that can neutralize cytotoxic agents, which may be anti-cancer agents. The cytotoxic agents can be any agent toxic to a cell in a patient, including an agent that kills a cell, such as an alkylating agent, an antimetabolite, a nucleotide analog, a taxane, a platinum-based agent, and/or an antibiotic. In certain aspects, the cytotoxic agent comprises gemcitabine. In certain aspects, the cytotoxic agent causes unwanted effects, including hair loss, fatigue, bruising, infection, anemia, gastrointestinal issues (such as nausea, vomiting, appetite changes, constipation, diarrhea), weight change, skin lesions, brain fog, change in libido, fertility issues, which may be reduced by the activity of the protection molecule. The cytotoxic agent may cause tissue degradation, including cardiac, pulmonary, liver, renal, gastrointestinal, or dermal tissue degradation.

[0017] The antigen-binding proteins described herein can be conjugated to the protection molecules described herein using any conjugation method. The protein and protection molecule can be conjugated using fusion chemistry, such as click chemistry, which may be copper-free click chemistry. The protein can be conjugated to the protection molecule at any suitable residue or moiety on the protein or protection molecule. The protein can be conjugated to the protection molecule at a primary amine on either the protein or protection molecule. In certain aspects, the antigen-binding protein and protection molecule are a single recombinant protein. The single recombinant protein may be generated by a nucleic acid that encodes both the antigen-binding protein and the protection molecule. The antigen-binding protein and protection molecule may be conjugated as a recombinant protein using an amino acid linker encoded in the nucleic acid. In certain aspects, the a heavy chain of the antigen-binding protein, a light chain of the antigen-binding protein, and the protection molecule are a single recombinant protein. The heavy chain, light chain, and antigen-binding protein may be separated by linkers, including a linker comprising one or more glycines and one or more serines such as a Glycine₄Serine linker. In some aspects, the linker comprises a linker disclosed in Table 2. In some aspects, the antigen-binding protein and the protection molecule are conjugated through one or more cognate affinity-binding molecules. The affinity-binding molecules can include molecules that can be appended to a protein and are able to bind to its cognate affinity-binding molecule. Examples of cognate affinity-binding molecule pairs include biotin and avidin or streptavidin, SpyTag and SpyCatcher, or other epitope tags and their cognate binding partner. The conjugation may occur anywhere on either the antigen-binding protein and/or protection molecule, including at the N-terminus and/or C-terminus of either molecule. The conjugation system may be a cleavable system. For example, the fusion chemistry may be reverable or contain cleavable moieties. The recombinant protein may comprise a cleavable sequence.

[0018] Certain aspects relate to compositions comprising any of the antigen-binding proteins described herein. The composition can also comprise other agents, including any cytotoxic agent described herein. The amount of cytotoxic agent in the composition can be an amount that is greater than an amount within the cytotoxic agent's therapeutic window. For example, the amount of cytotoxic agent in the composition can be an amount that is greater than what one skilled in the art would provide in the composition absent the antigen-binding protein. In certain aspects, the composition comprises an amount of cytotoxic agent of at least, at most, or approximately 100, 200, 300, 400, 500, 600, 700, 800, 900, 1000, 1100, 1200, 1300, 1400, 1500, 1600, 1700, 1800, 1900, 2000, 2100, 2200, 2300, 2400, 2500, 2600, 2700, 2800, 2900, or 3000 mg (or any range derivable therein). In certain aspects, the composition comprises an amount of gemcitabine of at least, at most, or approximately 100, 200, 300, 400, 500, 600, 700, 800, 900, 1000, 1100, 1200, 1300, 1400, 1500, 1600, 1700, 1800, 1900, 2000, 2100, 2200, 2300, 2400, 2500, 2600, 2700, 2800, 2900, or 3000 mg (or any range derivable therein). It is also contemplated herein that, in some aspects, one or more cytotoxic agents are not included in the composition.

[0019] Also described herein are methods including but not limited to methods of treating a patient, or methods of reducing one or more side effects of a cytotoxic agent, or methods of reducing cytotoxicity of a cytotoxic agent, or methods of expanding a therapeutic window of a cytotoxic agent, or methods of increasing the effective amount of a cytotoxic agent provided to a patient, any of which methods can comprise the step of administering to the patient any of the antigen-binding proteins conjugated to a protection molecule described herein. The patient can have received, or will receive the cytotoxic agent, before, during, or after being administered the antigen-binding protein. In certain aspects, the patient receives, or will receive, an amount of the cytotoxic agent that is greater than what one skilled in the art would administer to the patient absent the administration of the antigen-binding protein. In certain aspects, the patient has a disease, has been diagnosed with, has one or more symptoms of, or is suspected of having a disease, that is indicated for the cytotoxic agent. In certain aspects, the patient has, has been diagnosed with, has one or more symptoms of, or is suspected of having, a cancer, an infection, or an autoimmune disease. In certain aspects, the patient has had an adverse reaction to the cytotoxic agent. In certain aspects, the patient is prognosed to have an adverse reaction to the cytotoxic agent. In certain aspects, the patient is indicated to receive the cytotoxic agent.

[0020] In some aspects, the patient has or is likely to have one or more side effects from the cytotoxic agent. In some aspects, administering the antigen-binding protein conjugated to the protection molecule reduces the severity of or eliminates one or more side effects of the cytotoxic agent. In some aspects, the side effects comprise neutropenia, anemia, thrombocytopenia, lymphopenia, or a combination thereof. In some aspects, the side effects occur or are worsened when the patient receives the cytotoxic agent at a dosage above the therapeutic window of the cytotoxic agent. In some aspects, the side effects relate to the cytotoxic agent killing or affecting one or more healthy cells in the patient, including any of the healthy cells described herein.

[0021] Also disclosed are the following enumerated aspects:
[0022] Aspect 1 includes a composition comprising an antigen-binding protein conjugated to a protection molecule, wherein the protection molecule comprises a molecule capable of neutralizing a cytotoxic agent.
[0023] Aspect 2 depends upon Aspect 1, wherein the antigen-binding protein is an antibody or functional fragment thereof.
[0024] Aspect 3 depends upon Aspect 1 or 2, wherein the antigen-binding protein is capable of binding to an antigen expressed on a healthy cell.
[0025] Aspect 4 depends upon Aspect 3, wherein the healthy cell is a rapidly dividing healthy cell.
[0026] Aspect 5 depends upon Aspect 3 or 4, wherein the healthy cell is a gastrointestinal cell, a bone marrow cell, an endothelial cell, a progenitor cell, a dermal cell, a cardiac cell, a liver cell, a kidney cell, a lung cell, an immune cell, a nervous system cell, and/or a mucosal cell.
[0027] Aspect 6 depends upon any one of Aspects 1 to 5, wherein the antigen-binding protein is capable of binding to CD34.
[0028] Aspect 7 depends upon any one of Aspects 1 to 5, wherein the antigen-binding protein is not capable of binding to CD34.
[0029] Aspect 8 depends upon any one of Aspects 1 to 5, wherein the antigen-binding protein is capable of binding to CD117.
[0030] Aspect 9 depends upon any one of Aspects 1 to 5, wherein the antigen-binding protein is not capable of binding to CD117.
[0031] Aspect 10 depends upon any one of Aspects 1 to 9, wherein the antigen-binding protein comprises a heavy chain amino acid sequence provided in Table 1 and a light chain amino acid sequence provided in Table 1, or a functional fragment thereof.
[0032] Aspect 11 depends upon any one of Aspects 1 to 10, wherein the antigen-binding protein and/or protection molecule comprises a purification tag.
[0033] Aspect 12 depends upon Aspect 11, wherein the purification tag comprises a 6×Histidine tag.
[0034] Aspect 13 depends upon Aspect 11 or 12, wherein the purification tag comprises a protease cleavage sequence.
[0035] Aspect 14 depends upon any one of Aspects 1 to 13, wherein the antigen-binding protein does not comprise an Fc region.
[0036] Aspect 15 depends upon any one of Aspects 1 to 14, wherein the protection molecule comprises an enzyme.
[0037] Aspect 16 depends upon any one of Aspects 1 to 15, wherein the protection molecule comprises a cytidine deaminase.
[0038] Aspect 17 depends upon Aspect 16, wherein the cytidine deaminase is a human cytidine deaminase.
[0039] Aspect 18 depends upon Aspect 16 or 17, wherein the cytidine deaminase comprises the amino acid sequence provided in Table 3.
[0040] Aspect 19 depends upon any one of Aspects 1 to 18, wherein the cytotoxic agent comprises an anti-cancer agent.
[0041] Aspect 20 depends upon any one of Aspects 1 to 19, wherein the cytotoxic agent comprises an alkylating agent, an antimetabolite, a nucleotide analog, a taxane, a platinum-based agent, and/or an antibiotic.
[0042] Aspect 21 depends upon any one of Aspects 1 to 20, wherein the cytotoxic agent comprises gemcitabine.
[0043] Aspect 22 depends upon any one of Aspects 1 to 21, wherein the antigen-binding protein and protection molecule are conjugated through click chemistry.
[0044] Aspect 23 depends upon Aspect 22, wherein the click chemistry is copper-free click chemistry.
[0045] Aspect 24 depends upon any one of Aspects 1 to 23, wherein the protection molecule is conjugated to a primary amine on the antigen-binding protein.
[0046] Aspect 25 depends upon any one of Aspects 1 to 21, wherein the antigen-binding protein and protection molecule are conjugated as a recombinant protein.
[0047] Aspect 26 depends upon any one of Aspects 1 to 21, wherein the antigen-binding protein and protection molecule are conjugated by cognate affinity-binding molecules.
[0048] Aspect 27 depends upon Aspect 26, wherein the cognate affinity-binding molecules comprise biotin and streptavidin and/or biotin and avidin.
[0049] Aspect 28 depends upon Aspect 26, wherein the cognate affinity-binding molecules comprise a Spy Tag and SpyCatcher.
[0050] Aspect 29 depends upon any one of Aspects 1 to 28, wherein the antigen-binding protein is cleavable from the protection molecule.
[0051] Aspect 30 depends upon any one of Aspects 1 to 29, wherein the protection molecule is conjugated to the N-terminus and/or C-terminus of the antigen-binding protein.
[0052] Aspect 31 includes a composition according to any one of Aspects 1 to 30, further comprising the cytotoxic agent.
[0053] Aspect 32 depends upon Aspect 31, wherein the composition comprises an amount of the cytotoxic agent greater than an amount within the cytotoxic agent's therapeutic window.
[0054] Aspect 33 includes a protein comprising a heavy chain amino acid sequence provided in Table 1, a light chain amino acid sequence provided in Table 1, and a cytidine deaminase sequence provided in Table 3.
[0055] Aspect 34 depends upon Aspect 33, further comprising a linker amino acid sequence provided in Table 2 and/or a His tag provided in Table 4.
[0056] Aspect 35 includes a CD117-binding protein-cytidine deaminase conjugate comprising an amino acid sequence provided in Table 5.
[0057] Aspect 36 includes a method of treating a patient that has, or will receive, a cytotoxic agent, the method comprising administering an antigen-binding protein conjugated to a protection molecule, wherein the protection molecule comprises a molecule capable of neutralizing the cytotoxic agent.
[0058] Aspect 37 depends upon Aspect 36, wherein the antigen-binding protein is an antibody or functional fragment thereof.
[0059] Aspect 38 depends upon Aspect 36 or 37, wherein the antigen-binding protein is capable of binding to an antigen expressed on a healthy cell.
[0060] Aspect 39 depends upon Aspect 38, wherein the healthy cell is a rapidly dividing healthy cell.
[0061] Aspect 40 depends upon Aspect 38 or 39, wherein the healthy cell is a gastrointestinal cell, a bone marrow cell, an endothelial cell, a progenitor cell, a dermal cell, a cardiac cell, a liver cell, a kidney cell, a lung cell, an immune cell, a nervous system cell, and/or a mucosal cell.
[0062] Aspect 41 depends upon any one of Aspects 36 to 40, wherein the antigen-binding protein is capable of binding to CD34.
[0063] Aspect 42 depends upon any one of Aspects 36 to 40, wherein the antigen-binding protein is not capable of binding to CD34.
[0064] Aspect 43 depends upon any one of Aspects 36 to 40, wherein the antigen-binding protein is capable of binding to CD117.
[0065] Aspect 44 depends upon any one of Aspects 36 to 40, wherein the antigen-binding protein is not capable of binding to CD117.
[0066] Aspect 45 depends upon any one of Aspects 36 to 40, wherein the antigen-binding protein comprises a heavy chain amino acid sequence provided in Table 1 and a light chain amino acid sequence provided in Table 1, or a functional fragment thereof.
[0067] Aspect 46 depends upon any one of Aspects 36 to 45, wherein the antigen-binding protein and/or protection molecule comprises a purification tag.
[0068] Aspect 47 depends upon Aspect 46, wherein the purification tag comprises a 6×Histidine tag.
[0069] Aspect 48 depends upon Aspect 46 or 47, wherein the purification tag comprises a protease cleavage sequence.
[0070] Aspect 49 depends upon any one of Aspects 36 to 48, wherein the antigen-binding protein does not comprise an Fc region.
[0071] Aspect 50 depends upon any one of Aspects 36 to 49, wherein the protection molecule comprises an enzyme.
[0072] Aspect 51 depends upon any one of Aspects 36 to 50, wherein the protection molecule comprises a cytidine deaminase.
[0073] Aspect 52 depends upon Aspect 51, wherein the cytidine deaminase is a human cytidine deaminase.
[0074] Aspect 53 depends upon Aspect 51 or 52, wherein the cytidine deaminase comprises the amino acid sequence provided in Table 3.
[0075] Aspect 54 depends upon any one of Aspects 36 to 53, wherein the cytotoxic agent comprises an anti-cancer agent.
[0076] Aspect 55 depends upon any one of Aspects 36 to 54, wherein the cytotoxic agent comprises an alkylating agent, an antimetabolite, a nucleotide analog, a taxane, a platinum-based agent, and/or an antibiotic.
[0077] Aspect 56 depends upon any one of Aspects 36 to 55, wherein the cytotoxic agent comprises gemcitabine.
[0078] Aspect 57 depends upon any one of Aspects 36 to 56, wherein the antigen-binding protein and protection molecule are conjugated through click chemistry.
[0079] Aspect 58 depends upon Aspect 57, wherein the click chemistry is copper-free click chemistry.
[0080] Aspect 59 depends upon any one of Aspects 36 to 58, wherein the protection molecule is conjugated to a primary amine on the antigen-binding protein.
[0081] Aspect 60 depends upon any one of Aspects 36 to 56, wherein the antigen-binding protein and protection molecule are conjugated as a recombinant protein.
[0082] Aspect 61 depends upon any one of Aspects 36 to 56, wherein the antigen-binding protein and protection molecule are conjugated by cognate affinity-binding molecules.
[0083] Aspect 62 depends upon Aspect 61, wherein the cognate affinity-binding molecules comprise biotin and streptavidin and/or biotin and avidin.
[0084] Aspect 63 depends upon Aspect 61, wherein the cognate affinity-binding molecules comprise a Spy Tag and SpyCatcher.
[0085] Aspect 64 depends upon any one of Aspects 36 to 63, wherein the antigen-binding protein is cleavable from the protection molecule.
[0086] Aspect 65 depends upon any one of Aspects 36 to 64, wherein the protection molecule is conjugated to the N-terminus and/or C-terminus of the antigen-binding protein.
[0087] Aspect 66 depends upon any one of Aspects 36 to 65, wherein the patient received, or will receive, an amount of the cytotoxic agent that is greater than an amount in the cytotoxic agent's therapeutic window.
[0088] Aspect 67 depends upon any one of Aspects 36 to 66, wherein the patient is administered the antigen-binding protein prior to receiving the cytotoxic agent.
[0089] Aspect 68 depends upon any one of Aspects 36 to 67, wherein the patient is administered the antigen-binding protein concurrently with or in the same composition as the cytotoxic agent.
[0090] Aspect 69 depends upon any one of Aspects 36 to 68, wherein the patient is administered the antigen-binding protein subsequent to receiving the cytotoxic agent.
[0091] Aspect 70 depends upon any one of Aspects 36 to 69, wherein the patient has, has been diagnosed with, has one or more symptoms of, or is suspected of having a disease indicated for the cytotoxic agent.
[0092] Aspect 71 depends upon any one of Aspects 36 to 70, wherein the patient has, has been diagnosed with, has one or more symptoms of, or is suspected of having a cancer, an infection, or an autoimmune disease.
[0093] Aspect 72 depends upon any one of Aspects 36 to 71, wherein the patient has had an adverse reaction to the cytotoxic agent.
[0094] Aspect 73 depends upon any one of Aspects 36 to 72, wherein the patient is indicated to receive the cytotoxic agent.
[0095] Aspect 74 depends upon any one of Aspects 36 to 73, wherein the antigen-binding protein is administered by injection.
[0096] Aspect 75 depends upon any one of Aspects 36 to 74, wherein the antigen-binding protein is administered intravenously.
[0097] Aspect 76 includes a method of reducing one or more side effects of a cytotoxic agent, the method comprising administering to a patient an antigen-binding protein conjugated to a protection molecule, wherein the protection molecule comprises a molecule capable of neutralizing the cytotoxic agent.
[0098] Aspect 77 depends upon Aspect 76, wherein the antigen-binding protein is an antibody or functional fragment thereof.
[0099] Aspect 78 depends upon Aspect 76 or 77, wherein the antigen-binding protein is capable of binding to an antigen expressed on a healthy cell.
[0100] Aspect 79 depends upon Aspect 78, wherein the healthy cell is a rapidly dividing healthy cell.
[0101] Aspect 80 depends upon Aspect 78 or 79, wherein the healthy cell is a gastrointestinal cell, a bone marrow cell, an endothelial cell, a progenitor cell, a dermal cell, a cardiac cell, a liver cell, a kidney cell, a lung cell, an immune cell, a nervous system cell, and/or a mucosal cell.
[0102] Aspect 81 depends upon any one of Aspects 76 to 80, wherein the antigen-binding protein is capable of binding to CD34.
[0103] Aspect 82 depends upon any one of Aspects 76 to 80, wherein the antigen-binding protein is not capable of binding to CD34.
[0104] Aspect 83 depends upon any one of Aspects 76 to 80, wherein the antigen-binding protein is capable of binding to CD117.
[0105] Aspect 84 depends upon any one of Aspects 76 to 80, wherein the antigen-binding protein is not capable of binding to CD117.
[0106] Aspect 85 depends upon any one of Aspects 76 to 80, wherein the antigen-binding protein comprises a heavy chain amino acid sequence provided in Table 1 and a light chain amino acid sequence provided in Table 1, or a functional fragment thereof.
[0107] Aspect 86 depends upon any one of Aspects 76 to 85, wherein the antigen-binding protein comprises a purification tag.
[0108] Aspect 87 depends upon Aspect 86, wherein the purification tag comprises a 6×Histidine tag.
[0109] Aspect 88 depends upon Aspect 86 or 87, wherein the purification tag comprises a protease cleavage sequence.
[0110] Aspect 89 depends upon any one of Aspects 76 to 88, wherein the antigen-binding protein does not comprise an Fc region.
[0111] Aspect 90 depends upon any one of Aspects 76 to 89, wherein the protection molecule comprises an enzyme.
[0112] Aspect 91 depends upon any one of Aspects 76 to 90, wherein the protection molecule comprises a cytidine deaminase.
[0113] Aspect 92 depends upon Aspect 91, wherein the cytidine deaminase is a human cytidine deaminase.
[0114] Aspect 93 depends upon Aspect 91 or 92, wherein the cytidine deaminase comprises the amino acid sequence provided in Table 3.
[0115] Aspect 94 depends upon any one of Aspects 76 to 93, wherein the cytotoxic agent comprises an anti-cancer agent.
[0116] Aspect 95 depends upon any one of Aspects 76 to 94, wherein the cytotoxic agent comprises an alkylating agent, an antimetabolite, a nucleotide analog, a taxane, a platinum-based agent, and/or an antibiotic.
[0117] Aspect 96 depends upon any one of Aspects 76 to 95, wherein the cytotoxic agent comprises gemcitabine.
[0118] Aspect 97 depends upon any one of Aspects 76 to 96, wherein the antigen-binding protein and protection molecule are conjugated through click chemistry.
[0119] Aspect 98 depends upon Aspect 97, wherein the click chemistry is copper-free click chemistry.
[0120] Aspect 99 depends upon any one of Aspects 76 to 98, wherein the protection molecule is conjugated to a primary amine on the antigen-binding protein.
[0121] Aspect 100 depends upon any one of Aspects 76 to 96, wherein the antigen-binding protein and protection molecule are conjugated as a recombinant protein.
[0122] Aspect 101 depends upon any one of Aspects 76 to 96, wherein the antigen-binding protein and protection molecule are conjugated by cognate affinity-binding molecules.
[0123] Aspect 102 depends upon Aspect 101, wherein the cognate affinity-binding molecules comprise biotin and streptavidin and/or biotin and avidin.
[0124] Aspect 103 depends upon Aspect 101, wherein the cognate affinity-binding molecules comprise a SpyTag and SpyCatcher.
[0125] Aspect 104 depends upon any one of Aspects 76 to 103, wherein the antigen-binding protein is cleavable from the protection molecule.
[0126] Aspect 105 depends upon any one of Aspects 76 to 104, wherein the protection molecule is conjugated to the N-terminus and/or C-terminus of the antigen-binding protein.
[0127] Aspect 106 depends upon any one of Aspects 76 to 105, wherein the patient received, or will receive, an amount of the cytotoxic agent that is greater than an amount in the cytotoxic agent's therapeutic window.
[0128] Aspect 107 depends upon any one of Aspects 76 to 106, wherein the patient is administered the antigen-binding protein prior to receiving the cytotoxic agent.
[0129] Aspect 108 depends upon any one of Aspects 76 to 107, wherein the patient is administered the antigen-binding protein concurrently with or in the same composition as the cytotoxic agent.
[0130] Aspect 109 depends upon any one of Aspects 76 to 108, wherein the patient is administered the antigen-binding protein subsequent to receiving the cytotoxic agent.
[0131] Aspect 110 depends upon any one of Aspects 76 to 109, wherein the patient has, has been diagnosed with, has one or more symptoms of, or is suspected of having a disease indicated for the cytotoxic agent.
[0132] Aspect 111 depends upon any one of Aspects 76 to 110, wherein the patient has, has been diagnosed with, has one or more symptoms of, or is suspected of having a cancer, an infection, or an autoimmune disease.
[0133] Aspect 112 depends upon any one of Aspects 76 to 111, wherein the patient has had an adverse reaction to the cytotoxic agent.
[0134] Aspect 113 depends upon any one of Aspects 76 to 112, wherein the patient is indicated to receive the cytotoxic agent.
[0135] Aspect 114 depends upon any one of Aspects 76 to 113, wherein the antigen-binding protein is administered by injection.
[0136] Aspect 115 depends upon any one of Aspects 76 to 114, wherein the antigen-binding protein is administered intravenously.
[0137] Aspect 116 depends upon any one of Aspects 76 to 115, wherein the side effects comprise neutropenia, anemia, thrombocytopenia, lymphopenia, or a combination thereof.
[0138] Aspect 117 depends upon any one of Aspects 76 to 116, wherein the side effects occur or are worsened when the patient receives the cytotoxic agent at a dosage above the therapeutic window of the cytotoxic agent.

### BRIEF DESCRIPTION OF THE DRAWINGS

[0139] The following drawings form part of the present specification and are included to further demonstrate certain aspects of the present invention. The invention may be better understood by reference to one or more of these drawings in combination with the detailed description of specific embodiments presented herein.

[0140] FIGS. 1A-1B. Molecularly-targeted chemoprotection widens the therapeutic window of cytotoxic chemotherapy by selectively protecting healthy tissues from toxicity. FIG. 1A shows the therapeutic window between efficacy of a drug and toxicity of a drug. FIG. 1B shows a schematic for the antigen-binding proteins conjugated to protection molecule concept.

[0141] FIGS. 2A-2C. FIG. 2A shows a specific example of an antigen-binding protein conjugated to a protection molecule. CD34 is a surface protein commonly expressed on stem and progenitor cells, with low expression on solid tumors. An antibody targeting CD34 is conjugated to cytidine deaminase, an enzyme that degrades the chemotherapeutic drug (CTX) gemcitabine (FIG. 2B). FIG. 2C shows an example of copper-free click chemistry and NHS ester chemistry used to build a conjugate exemplified herein.

[0142] FIGS. 3A-3B. Cytidine deaminase (CDA) is able to protect mammalian cells from gemcitabine toxicity (FIG. 3A) to levels indistinguishable from negative control. Anti-CD34 and anti-EpCAM Antibodies against CD34⁺ and EpCAM⁺ cell lines are used to demonstrate molecularly-targeted chemoprotection in vitro (FIG. 3B).

[0143] FIG. 4. Enzyme activity assay results for antibodies conjugated to CDA, normalized to the original activity of unconjugated CDA and background control.

[0144] FIG. 5. A representation of a fusion protein described herein. VH: heavy chain variable fragment of CD117 antibody. VL: light chain variable fragment of CD117 antibody. (G4S)3: glycine serine linker. CDA: human cytidine deaminase.

[0145] FIG. 6. A representation of a fusion protein described herein showing subunits. Heavy chain variable fragment of CD117 antibody, glycine, serine linker, light chain variable fragment of CD117 antibody, cytidine deaminase, and 6× histidine tag are shown.

[0146] FIG. 7. Flow cytometry results for CD117 in ovarian cancer, breast cancer, and pancreatic cancer cell lines.

[0147] FIG. 8. Extracellular CDA can reduce gemcitabine-mediated cell killing; protection against gemcitabine is extracellular CDA dose-dependent. This indicates when our fusion protein with CDA is in the extracellular space, it should be able to inactivate gemcitabine without the need to be internalized.

[0148] FIGS. 9A-9E. Exemplary production of cytidine deaminase fusion protein. FIG. 9A shows that the scFv_CD117_CDA_His fusion protein is produced in the induced lysate. FIG. 9B shows a Western blot of nickel resin-purified T7 shuffle lysate. S1: flow through after resin binding. W1: initial wash with equilibration buffer. WW1: second wash with equilibration buffer and lower concentration elution buffer. E #: eluted fractions. E2 is 1.75 ug/mL CDA. FIG. 9C shows CDA concentrations in T7 shuffle lysate purified samples. FIG. 9D shows absorbance results from indirect ELISA of a fusion protein binding to CD117. FIG. 9E shows results from CDA activity assay of a fusion protein.

[0149] FIG. 10. An image of a Western blot for 6×Histidine of proteins produced by T7 Shuffle cells under three different induction conditions: 1) 30° C. for 4 hours; 2) 25° C. for 24 hours; and 3) 30° C. for 4 hours and 25° C. for 20 hours. The single chain variable fragment (scFv) of human CD117 antibody with the cytidine deaminase (CDA) enzyme was produced in T7 Shuffle cells, the recombinant fusion protein expected at about 48 kDa.

[0150] FIG. 11. Confirming the binding of the fusion protein to the target CD117. Absorbance results are shown from an indirect ELISA against CD117. Lysates from T7 Shuffle cells that were induced under different conditions were assayed to confirm the binding of the fusion protein to the target. Uninduced lysate was used as negative control and about 4× higher signal from induced lysate can be observed.

[0151] FIG. 12. An exemplary graphical representation of absorbance spectra shift from 271 nm to 262 nm, the indicative peaks of cytidine to uridine, to confirm the activity of CDA in a fusion protein.

[0152] FIGS. 13A-13F show CDA results of lysates of T7 Shuffle cells that were induced for 4 hours for scFv-CDA-His fusion protein. FIG. 13A shows an image of a Western blot for anti-6×Histine in lysate. FIG. 13B shows Western blot images of anti-6×Histine and anti-CDA in T7 Shuffle cell lysate samples from various stages of nickel resin purification. FIG. 13C shows a Western blot for anti-CDA in samples for 0, 25, 50, 75, 100, 500, and 1000 μg of CDA. FIG. 13D is a CDA standard curve on Western blot. FIG. 13E is a graphical representation of area over CDA in pg for the standards shown in FIG. 13D and tested samples. FIG. 13F is a graphical representation of CDA concentration in purified T7 Shuffle cell lysate samples. S1: flow through after resin binding. W1: initial wash with equilibration buffer. WW1: second wash with equilibration buffer and lower concentration elution buffer. E #: eluted fractions. E2 is 1.75 ug/mL CDA.

[0153] FIGS. 14A-14E show CDA activity and CD117 binding results of eluted fractions from T7 Shuffle cell lysates that were induced for 4 hours with a scFV-CDA-His fusion protein. FIG. 14A is a schematic diagram of an indirect ELISA procedure. FIG. 14B illustrates the chemical reactions in CDA activity assay. FIG. 14C is a cytidine standard curve graph. FIG. 14D is a graphical representation of binding affinity of a fusion protein to CD117. FIG. 14E is a graphical representation of CDA activity of a fusion protein.

[0154] FIGS. 15A-15D show images of SDS-PAGE gels for confirming the production of proteins of interest in BL21 DE3 and T7 Shuffle cells. FIG. 15A is an image of a SDS-PAGE gel of lysates of BL21 DE3 that were induced under 37° C. or 30° C., for 4 hours, 7 hours, or overnight, for scFv-His. FIG. 15B is an image of a SDS-PAGE gel of lysates of BL21 DE3 that were induced under 37° C. or 30° C., for 4 hours, 7 hours, or overnight, for CDA-His. * marks an erroneous sample where the correct 30 C 7 h sample is shown on the far right marked *. FIG. 15C is an image of a SDS-PAGE gel of lysates of BL21 DE3 that were induced under 37° C. or 30° C., for 4 hours, 7 hours, or overnight, for scFv-CDA-His. ** marks an erroneous sample where the correct 30 C 7 h is shown on the far right marked **. FIG. 15D is an image of a SDS-PAGE gel of lysates of T7 Shuffle that were induced under 30° C. for 4 hours or overnight, for scFv-His, CDA-His, or scFv-CDA-His.

[0155] FIGS. 16A-16C show images of SDS-PAGE gels for confirming the yield of protein after purification, and for the purity of each sample. FIG. 16A is an image of a SDS-PAGE gel of purified protein samples from lysates of BL21 DE3 that were induced at 37° C. or 30° C., for 4 hours, 7 hours, or overnight, for scFv-His or scFv-CDA-His. FIG. 16B is an image of a SDS-PAGE gel of purified protein samples from lysates of BL21 DE3 that were induced at 37° C. or 30° C., for 4 hours, 7 hours, or overnight, for CDA-His or scFv-CDA-His. FIG. 16C is an image of a SDS-PAGE gel of purified protein samples from lysates of T7 Shuffle that were induced at 30° C. for 4 hours or overnight, for scFv-His, CDA-His, or scFv-CDA-His.

[0156] FIGS. 17A-17D show the determination of purity of samples by densitometry analysis on SDS-PAGE gels. FIG. 17A is an image of a SDS-PAGE gel of lysates from BL21 DE3 that were induced for 4 hours, 7 hours, or overnight, at 37° C. or 30° C., for scFv-His or scFv-CDA-His. FIG. 17B is a graphical representation of intensity of the ladder bands in lane 1 shown in FIG. 17A. FIG. 17C is a graphical representation of intensity of the bands in lane 7 shown in FIG. 17A. FIG. 17D shows results from a densitometry analysis of lane 7, emphasizing the bange percentages and band number 11.

[0157] FIGS. 18A-18B are graphical representations of the purity and concentration of protein samples determined by densitometry analysis on SDS-PAGE gels. FIG. 18A shows the percent purity of scFv-His, CDA-His, and scFv-CDA-His induced in BL21 DE3 or T7 Shuffle over 4, 7, or overnight, at 37° C. or 30° C. Purity of samples ranged from about 5-85%. FIG. 18B shows the ceoncentration in μg/mL of scFv-His, CDA-His, and scFv-CDA-His induced in BL21 DE3 or T7 Shuffle over 4, 7, or overnight, at 37° C. or 30° C. The amount of protein can be calculated by percent purity multiplied by total protein concentration in the sample measured by Qubit. High range of protein concentration is shown, with the yield between about 4-450 μg/mL.

[0158] FIGS. 19A-19F show representative Western blot images validating the presence of scFv-His, CDA-HIS, or scFv-CDA-His in BL21 and T7 Shuffle cells by using an anti-6×Histidine antibody. FIG. 19A shows a Western blot image of scFv-His in BL21 cells that were induced for 4 hours, 7 hours, or overnight, at 37° C. or 30° C. FIG. 19B shows a Western blot image of scFv-His in T7 Shuffle that were induced overnight or for 4 hours at 30° C. FIG. 19C shows a Western blot image of CDA-His in BL21 cells that were induced for 4 hours, 7 hours, or overnight, at 37° C. or 30° C. FIG. 19D shows a Western blot image of CDA-His in T7 Shuffle that were induced overnight or for 4 hours at 30° C. FIG. 19E shows a Western blot image of scFv-CDA-His in BL21 cells that were induced for 4 hours, 7 hours, or overnight, at 37° C. or 30° C. FIG. 19F shows a Western blot image of CDA-His in T7 Shuffle that were induced overnight or for 4 hours at 30° C.

[0159] FIGS. 20A-20B show the activity of recombinantly produced CDA-His measured by using the indophenol method. FIG. 20A is a graphical representation of ammonia produced in μM. FIG. 20B is a graphical representation of the mean specific CDA activity of CDA-His that were induced in BL21 DE3 for 4 hours, 7 hours, or overnight at 37° C. or 30° C. A commercially available CDA is provided as a positive control.

[0160] FIG. 21 is a graphical representation of the binding of recombinantly produced scFv-His and scFv-CDA-His to CD117 by using indirect CD117 ELISA. Protein samples are from BL21 DE3 and T7 Shuffle that were induced for 4 hours, 7 hours, or overnight at 37° C. or 30° C.

### DESCRIPTION OF ILLUSTRATIVE ASPECTS

[0161] Though previous literature has shown overexpression of CDA in HSPCs leads to less killing by gemcitabine, the conjugated proteins described herein provide novel therapeutics, which may be injected, that can deliver the enzyme directly. With the previous overexpression methods, the HSPCs would first need to collected from the patient, then genetically modified ex vivo, and transplanted back into the patient. The compositions and methods and other aspects described herein beneficially do not require any cell collection or ex vivo modification, making such aspects more easily translatable to a clinical setting.

[0162] Comparing the aspects herein to the ADEPT technology and other previous methods, said aspects are fundamentally different in at least two ways. First, the aspects target healthy cells and not cancer cells. Previous methods required identifying tumor-specific antigens, which can be especially challenging due to 1) the low abundance of such antigens in solid tumors versus liquid tumors, 2) the tumors' ability to alter the expression of their surface antigens to evade immune system attack, 3) the heterogeneous expression of the antigen within and between individuals, 4) the physical microenvironment barriers such as the dense stroma restricting infiltration and migration of molecules, and 5) the immunosuppressive tumor microenvironment inhibiting the activity of delivered molecules. The aspects described herein can overcome this antigen identification problem as 1) all individuals' HPSCs have the same antigens, eliminating the need for personalized treatment, 2) healthy cells do not alter the expression of their antigens as frequently as cancer cells, and 3) the bone marrow does not impose a physical barrier to complexes as it does not have a dense stroma/extracellular matrix. Second, aspects herein do not require delivering bacterial enzymes but may include delivery of human enzymes. Clinical trials for ADEPT showed high immunogenicity in patients receiving the treatment and the patients had developed antibodies against the bacterial enzymes. In aspects herein that deliver human-origin enzymes, low immunogenicity is expected.

### I. DEFINITIONS

[0163] The terms “protein,” “polypeptide,” and “peptide” are used interchangeably herein when referring to a gene product.

[0164] The term “antigen-binding protein” refers to a protein that specifically binds to a certain antigen. In some aspects, the antigen-binding protein has no, undetectable, or minimal non-specific binding. The certain antigen may be CD34.

[0165] “Homology,” or “identity” refers to sequence similarity between two peptides or between two nucleic acid molecules. Identity can be determined by comparing a position in each sequence which may be aligned for purposes of comparison. When a position in the compared sequence is occupied by the same base or amino acid, then the molecules share sequence identity at that position. A degree of identity between sequences is a function of the number of matching or homologous positions shared by the sequences. An “unrelated” or “non-homologous” sequence shares less than 60% identity, less than 50% identity, less than 40% identity, less than 30% identity, or less than 25% identity, with one of the sequences of the current disclosure.

[0166] The terms “amino portion,” “N-terminus,” “amino terminus,” and the like as used herein are used to refer to order of the regions of the polypeptide. Furthermore, when something is N-terminal to a region it is not necessarily at the terminus (or end) of the entire polypeptide, but just at the N-terminus of the region or domain. Similarly, the terms “carboxy portion,” “C-terminus,” “carboxy terminus,” and the like as used herein is used to refer to order of the regions of the polypeptide, and when something is C-terminal to a region it is not necessarily at the terminus (or end) of the entire polypeptide, but just at the C-terminus of the region or domain.

[0167] The terms “polynucleotide,” “nucleic acid,” and “oligonucleotide” are used interchangeably and refer to a polymeric form of nucleotides of any length, either deoxyribonucleotides or ribonucleotides or analogs thereof. Polynucleotides can have any three-dimensional structure and may perform any function, known or unknown. The following are non-limiting examples of polynucleotides: a gene or gene fragment (for example, a probe, primer, EST or SAGE tag), exons, introns, messenger RNA (mRNA), transfer RNA, ribosomal RNA, ribozymes, cDNA, dsRNA, siRNA, miRNA, recombinant polynucleotides, branched polynucleotides, plasmids, vectors, isolated DNA of any sequence, isolated RNA of any sequence, nucleic acid probes and primers. A polynucleotide can comprise modified nucleotides, such as methylated nucleotides and nucleotide analogs. If present, modifications to the nucleotide structure can be imparted before or after assembly of the polynucleotide. The sequence of nucleotides can be interrupted by non-nucleotide components. A polynucleotide can be further modified after polymerization, such as by conjugation with a labeling component. The term also refers to both double- and single-stranded molecules. Unless otherwise specified or required, any embodiment of this invention that is a polynucleotide encompasses both the double-stranded form and each of two complementary single-stranded forms known or predicted to make up the double-stranded form.

[0168] Cells or a culture of cells are “substantially free” of certain reagents or elements, such as serum, signaling inhibitors, animal components or feeder cells, exogenous genetic elements or vector elements, as used herein, when they have less than 10% of the element(s), and are “essentially free” of certain reagents or elements when they have less than 1% of the element(s). However, even more desirable are cell populations wherein less than 0.5% or less than 0.1% of the total cell population comprise exogenous genetic elements or vector elements.

[0169] Cells or a culture of cells are “essentially free” of certain reagents or elements, such as serum, signaling inhibitors, animal components or feeder cells, when the culture, matrix or medium respectively have a level of these reagents lower than a detectable level using conventional detection methods known to a person of ordinary skill in the art or these agents have not been extrinsically added to the culture, matrix or medium. The serum-free medium may be essentially free of serum.

[0170] A “gene,” “polynucleotide,” “coding region,” “sequence,” “segment,” “fragment,” or “transgene” which “encodes” a particular protein, is a nucleic acid molecule which is transcribed and optionally also translated into a gene product, e.g., a polypeptide, in vitro or in vivo when placed under the control of appropriate regulatory sequences. The coding region may be present in either a cDNA, genomic DNA, or RNA form. When present in a DNA form, the nucleic acid molecule may be single-stranded (i.e., the sense strand) or double-stranded. The boundaries of a coding region are determined by a start codon at the 5′ (amino) terminus and a translation stop codon at the 3′ (carboxy) terminus. A gene can include, but is not limited to, cDNA from prokaryotic or eukaryotic mRNA, genomic DNA sequences from prokaryotic or eukaryotic DNA, and synthetic DNA sequences. A transcription termination sequence will usually be located 3′ to the gene sequence.

[0171] The term “cell” is herein used in its broadest sense in the art and refers to a living body which is a structural unit of tissue of a multicellular organism, is surrounded by a membrane structure which isolates it from the outside, has the capability of self-replicating, and has genetic information and a mechanism for expressing it. Cells used herein may be naturally-occurring cells or artificially modified cells (e.g., fusion cells, genetically modified cells, etc.).

[0172] As used herein, the terms “treatment,” “treating,” and the like, refer to obtaining a desired pharmacologic and/or physiologic effect. The effect may be prophylactic in terms of completely or partially preventing a disease or symptom thereof and/or may be therapeutic in terms of a partial or complete cure for a disease and/or adverse effect attributable to the disease. “Treatment,” as used herein, covers any treatment of a disease in a mammal, e.g., in a human, and includes: (a) preventing the disease from occurring in a subject which may be predisposed to the disease but has not yet been diagnosed as having it; (b) inhibiting the disease, i.e., arresting its development; and (c) relieving the disease, i.e., causing regression of the disease.

[0173] In some aspects, the methods are useful for reducing the size and/or cell number of a tumor. In some aspects, the method of the disclosure are useful for inhibiting the growth of tumors, such as solid tumors, in a subject.

[0174] The term “antibody” includes monoclonal antibodies, polyclonal antibodies, dimers, multimers, multispecific antibodies and antibody fragments that may be human, mouse, humanized, chimeric, or derived from another species. A “monoclonal antibody” is an antibody obtained from a population of substantially homogeneous antibodies that is being directed against a specific antigenic site.

[0175] “Antibody or functional fragment thereof means an immunoglobulin molecule that specifically binds to, or is immunologically reactive with a particular antigen or epitope, and includes both polyclonal and monoclonal antibodies. The term antibody includes genetically engineered or otherwise modified forms of immunoglobulins, such as intrabodies, peptibodies, chimeric antibodies, fully human antibodies, humanized antibodies, and heteroconjugate antibodies (e.g., bispecific antibodies, diabodies, triabodies, and tetrabodies). The antibody may be derived from natural sources, or partly or wholly synthetically produced. An antibody may be monoclonal or polyclonal. The antibody may be a member of any immunoglobulin class, including any of the human classes: IgG, IgM, IgA, IgD, and IgE. The term functional antibody fragment includes antigen binding fragments of antibodies, including e.g., Fab′, F(ab′)2, Fab, Fv, rlgG, and scFv fragments. The term scFv refers to a single chain Fv antibody in which the variable domains of the heavy chain and of the light chain of a traditional two chain antibody have been joined to form one chain. The antibody fragment may optionally be a single chain antibody fragment. Alternatively, the fragment may comprise multiple chains which are linked together, for instance, by disulfide linkages. The fragment may also optionally be a multimolecular complex. A functional antibody fragment retains the ability to bind its cognate antigen at comparable affinity to the full antibody.

[0176] The term “monoclonal antibody” as used herein refers to an antibody obtained from a population of substantially homogeneous antibodies, e.g., the individual antibodies comprising the population are identical except for possible mutations, e.g., naturally occurring mutations, that may be present in minor amounts. Thus, the modifier “monoclonal” indicates the character of the antibody as not being a mixture of discrete antibodies. In certain aspects, such a monoclonal antibody typically includes an antibody comprising a polypeptide sequence that binds a target, wherein the target-binding polypeptide sequence was obtained by a process that includes the selection of a single target binding polypeptide sequence from a plurality of polypeptide sequences. For example, the selection process can be the selection of a unique clone from a plurality of clones, such as a pool of hybridoma clones, phage clones, or recombinant DNA clones. It should be understood that a selected target binding sequence can be further altered, for example, to improve affinity for the target, to humanize the target binding sequence, to improve its production in cell culture, to reduce its immunogenicity in vivo, to create a multispecific antibody, etc., and that an antibody comprising the altered target binding sequence is also a monoclonal antibody of this disclosure. In contrast to polyclonal antibody preparations, which typically include several different antibodies directed against different determinants (epitopes), each monoclonal antibody of a monoclonal antibody preparation is directed against a single determinant on an antigen. In addition to their specificity, monoclonal antibody preparations are advantageous in that they are typically uncontaminated by other immunoglobulins.

[0177] The phrases “pharmaceutical composition” or “pharmacologically acceptable composition” refers to molecular entities and compositions that do not produce an adverse, allergic, or other untoward reaction when administered to an animal, such as a human, as appropriate. The preparation of a pharmaceutical composition comprising an antibody or additional active ingredient will be known to those of skill in the art in light of the present disclosure. Moreover, for animal (e.g., human) administration, it will be understood that preparations should meet sterility, pyrogenicity, general safety, and purity standards as required by FDA Office of Biological Standards.

[0178] As used herein, “pharmaceutically acceptable carrier” includes any and all aqueous solvents (e.g., water, alcoholic/aqueous solutions, saline solutions, parenteral vehicles, such as sodium chloride, and Ringer's dextrose), non-aqueous solvents (e.g., propylene glycol, polyethylene glycol, vegetable oil, and injectable organic esters, such as ethyloleate), dispersion media, coatings, surfactants, antioxidants, preservatives (e.g., antibacterial or antifungal agents, anti-oxidants, chelating agents, and inert gases), isotonic agents, absorption delaying agents, salts, drugs, drug stabilizers, gels, binders, excipients, disintegration agents, lubricants, sweetening agents, flavoring agents, dyes, fluid and nutrient replenishers, such like materials and combinations thereof, as would be known to one of ordinary skill in the art. The pH and exact concentration of the various components in a pharmaceutical composition may be adjusted according to well-known parameters.

[0179] The term “unit dose” or “dosage” refers to physically discrete units suitable for use in a subject, each unit containing a predetermined quantity of the therapeutic composition calculated to produce the desired responses discussed herein in association with its administration, i.e., the appropriate route and treatment regimen. The quantity to be administered, both according to number of treatments and unit dose, depends on the effect desired. The actual dosage amount of a composition of the present aspects administered to a patient or subject can be determined by physical and physiological factors, such as body weight, the age, health, and sex of the subject, the type of disease being treated, the extent of disease penetration, previous or concurrent therapeutic interventions, idiopathy of the patient, the route of administration, and the potency, stability, and toxicity of the particular therapeutic substance. For example, a dose may also comprise from about 1 μg/kg/body weight to about 1000 mg/kg/body weight (this such range includes intervening doses) or more per administration, and any particular dose derivable therein. In non-limiting examples of a range derivable from the numbers listed herein, a range of about 5 μg/kg/body weight to about 100 mg/kg/body weight, about 5 μg/kg/body weight to about 500 mg/kg/body weight, etc., can be administered. The practitioner responsible for administration will, in any event, determine the concentration of active ingredient(s) in a composition and appropriate dose(s) for the individual subject.

[0180] The use of a single chain variable fragment (scFv) is of particular interest. scFvs are recombinant molecules in which the variable regions of light and heavy immunoglobulin chains encoding antigen-binding domains are engineered into a single polypeptide. Generally, the V_{H} and V_{L} sequences are joined by a linker sequence. See, for example, Ahmad (2012) Clinical and Developmental Immunology Article ID 980250, herein specifically incorporated by reference. Described herein are BCMA-specific scFv molecules that comprise the variable regions of light and heavy immunoglobulin chains encoding BCMA-binding domains that are engineered into a single polypeptide. Similarly, the CS1-specific scFv molecules described herein comprise the variable regions of light and heavy immunoglobulin chains encoding CS1-binding domains that are engineered into a single polypeptide.

[0181] As used herein, the term “binding affinity” refers to the equilibrium constant for the reversible binding of two agents and is expressed as a dissociation constant (Kd). Binding affinity can be at least 1-fold greater, at least 2-fold greater, at least 3-fold greater, at least 4-fold greater, at least 5-fold greater, at least 6-fold greater, at least 7-fold greater, at least 8-fold greater, at least 9-fold greater, at least 10-fold greater, at least 20-fold greater, at least 30-fold greater, at least 40-fold greater, at least 50-fold greater, at least 60-fold greater, at least 70-fold greater, at least 80-fold greater, at least 90-fold greater, at least 100-fold greater, or at least 1000-fold greater, or more (or any derivable range therein), than the binding affinity of an antibody for unrelated amino acid sequences. As used herein, the term “avidity” refers to the resistance of a complex of two or more agents to dissociation after dilution. The terms “immunoreactive” and “preferentially binds” are used interchangeably herein with respect to antibodies and/or antigen-binding fragments.

[0182] The term “binding” refers to a direct association between two molecules, due to, for example, covalent, electrostatic, hydrophobic, and ionic and/or hydrogen-bond interactions, including interactions such as salt bridges and water bridges.

[0183] A “therapeutically effective amount” or “efficacious amount” refers to the amount of an agent, or combined amounts of two agents, that, when administered to a mammal or other subject for treating a disease, is sufficient to effect such treatment for the disease. The “therapeutically effective amount” will vary depending on the agent(s), the disease and its severity and the age, weight, etc., of the subject to be treated.

[0184] Subject” and “patient” refer to either a human or non-human, such as primates, mammals, and vertebrates. In particular aspects, the subject is a human.

[0185] Throughout this application, the term “about” is used to indicate that a value includes the inherent variation of error for the device, the method being employed to determine the value, or the variation that exists among the study subjects.

### II. ANTIGEN-BINDING PROTEIN CONJUGATES

[0186] Aspects of the disclosure relate to antigen-binding proteins conjugated to a protection molecule. In some aspects, the antigen-binding protein comprises an anti-CD34 antibody or a fragment thereof. In some aspects, the antigen-binding protein comprises an anti-CD117 antibody or a fragment thereof. In some aspects, the antigen-binding protein does not comprise an anti-CD34 antibody or a fragment thereof. In some aspects, the antigen-binding protein does not comprise an anti-CD117 antibody or a fragment thereof. The term “antibody” refers to an intact immunoglobulin of any isotype, or a fragment thereof that can compete with the intact antibody for specific binding to the target antigen, and includes chimeric, humanized, fully human, and bispecific antibodies. As used herein, the terms “antibody” or “immunoglobulin” are used interchangeably and refer to any of several classes of structurally related proteins that function as part of the immune response of an animal, including IgG, IgD, IgE, IgA, IgM, and related proteins, as well as polypeptides comprising antibody CDR domains that retain antigen-binding activity.

[0187] The term “antigen” refers to a molecule or a portion of a molecule capable of being bound by a selective binding agent, such as an antibody. An antigen may possess one or more epitopes that are capable of interacting with different antibodies. The antigen may be expressed on a healthy cell. The healthy cells, such as rapidly dividing cells, may be susceptible to cytotoxic agents. The healthy cells may be cells that have not transformed to neoplastic cells. In some aspects, the antigen is a CD34 protein.

[0188] The term “epitope” includes any region or portion of molecule capable eliciting an immune response by binding to an immunoglobulin or to a T-cell receptor. Epitope determinants may include chemically active surface groups such as amino acids, sugar side chains, phosphoryl or sulfonyl groups, and may have specific three-dimensional structural characteristics and/or specific charge characteristics. Generally, antibodies specific for a particular target antigen will preferentially recognize an epitope on the target antigen within a complex mixture.

[0189] The epitope regions of a given polypeptide can be identified using many different epitope mapping techniques are well known in the art, including: x-ray crystallography, nuclear magnetic resonance spectroscopy, site-directed mutagenesis mapping, protein display arrays, see, e.g., Epitope Mapping Protocols, (Johan Rockberg and Johan Nilvebrant, Ed., 2018) Humana Press, New York, N.Y. Such techniques are known in the art and described in, e.g., U.S. Pat. No. 4,708,871; Geysen et al. Proc. Natl. Acad. Sci. USA 81:3998-4002 (1984); Geysen et al. Proc. Natl. Acad. Sci. USA 82:178-182 (1985); Geysen et al. Molec. Immunol. 23:709-715 (1986 See, e.g., Epitope Mapping Protocols, supra. Additionally, antigenic regions of proteins can also be predicted and identified using standard antigenicity and hydropathy plots.

[0190] An intact antibody is generally composed of two full-length heavy chains and two full-length light chains, but in some instances may include fewer chains, such as antibodies naturally occurring in camelids that may comprise only heavy chains. Antibodies as disclosed herein may be derived solely from a single source or may be “chimeric,” that is, different portions of the antibody may be derived from two different antibodies. For example, the variable or CDR regions may be derived from a rat or murine source, while the constant region is derived from a different animal source, such as a human. The antibodies or binding fragments may be produced in hybridomas, by recombinant DNA techniques, or by enzymatic or chemical cleavage of intact antibodies. Unless otherwise indicated, the term “antibody” includes derivatives, variants, fragments, and muteins thereof, examples of which are described below (Sela-Culang et al. Front Immunol. 2013; 4:302; 2013)

[0191] The term “light chain” includes a full-length light chain and fragments thereof having sufficient variable region sequence to confer binding specificity. A full-length light chain has a molecular weight of around 25,000 Daltons and includes a variable region domain (abbreviated herein as VL), and a constant region domain (abbreviated herein as CL). There are two classifications of light chains, identified as kappa (κ) and lambda (λ). The term “VL fragment” means a fragment of the light chain of a monoclonal antibody that includes all or part of the light chain variable region, including CDRs. A VL fragment can further include light chain constant region sequences. The variable region domain of the light chain is at the amino-terminus of the polypeptide.

[0192] The term “heavy chain” includes a full-length heavy chain and fragments thereof having sufficient variable region sequence to confer binding specificity. A full-length heavy chain has a molecular weight of around 50,000 Daltons and includes a variable region domain (abbreviated herein as VH), and three constant region domains (abbreviated herein as CH1, CH2, and CH3). The term “VH fragment” means a fragment of the heavy chain of a monoclonal antibody that includes all or part of the heavy chain variable region, including CDRs. A VH fragment can further include heavy chain constant region sequences. The number of heavy chain constant region domains will depend on the isotype. The VH domain is at the amino-terminus of the polypeptide, and the CH domains are at the carboxy-terminus, with the CH3 being closest to the —COOH end. The isotype of an antibody can be IgM, IgD, IgG, IgA, or IgE and is defined by the heavy chains present of which there are five classifications: mu (μ), delta (δ), gamma (γ), alpha (α), or epsilon (ε) chains, respectively. IgG has several subtypes, including, but not limited to, IgG1, IgG2, IgG3, and IgG4. IgM subtypes include IgM1 and IgM2. IgA subtypes include IgAQ1 and IgA2.

[0193] Antibodies can be whole immunoglobulins of any isotype or classification, chimeric antibodies, or hybrid antibodies with specificity to two or more antigens. They may also be fragments (e.g., F(ab′)2, Fab′, Fab, Fv, and the like), including hybrid fragments. An immunoglobulin also includes natural, synthetic, or genetically engineered proteins that act like an antibody by binding to specific antigens to form a complex. The term antibody includes genetically engineered or otherwise modified forms of immunoglobulins.

[0194] The term “monomer” means an antibody containing only one Ig unit. Monomers are the basic functional units of antibodies. The term “dimer” means an antibody containing two Ig units attached to one another via constant domains of the antibody heavy chains (the Fc, or fragment crystallizable, region). The complex may be stabilized by a joining (J) chain protein. The term “multimer” means an antibody containing more than two Ig units attached to one another via constant domains of the antibody heavy chains (the Fc region). The complex may be stabilized by a joining (J) chain protein.

[0195] The term “bivalent antibody” means an antibody that comprises two antigen-binding sites. The two binding sites may have the same antigen specificities or they may be bi-specific, meaning the two antigen-binding sites have different antigen specificities.

[0196] Bispecific antibodies are a class of antibodies that have two paratopes with different binding sites for two or more distinct epitopes. In some aspects, bispecific antibodies can be biparatopic, wherein a bispecific antibody may specifically recognize a different epitope from the same antigen. In some aspects, bispecific antibodies can be constructed from a pair of different single domain antibodies termed “nanobodies”. Single domain antibodies are sourced and modified from cartilaginous fish and camelids. Nanobodies can be joined together by a linker using techniques typical to a person skilled in the art; such methods for selection and joining of nanobodies are described in PCT Publication No. WO2015044386A1, No. WO2010037838A2, and Bever et al., Anal Chem. 86:7875-7882 (2014), each of which are specifically incorporated herein by reference in their entirety.

[0197] Bispecific antibodies can be constructed as: a whole IgG, Fab′2, Fab′PEG, a diabody, or alternatively as scFv. Diabodies and scFvs can be constructed without an Fc region, using only variable domains, potentially reducing the effects of anti-idiotypic reaction. Bispecific antibodies may be produced by a variety of methods including, but not limited to, fusion of hybridomas or linking of Fab′ fragments. See, e.g., Songsivilai and Lachmann, Clin. Exp. Immunol. 79:315-321 (1990); Kostelny et al., J. Immunol. 148:1547-1553 (1992), each of which are specifically incorporated by reference in their entirety.

[0198] In certain aspects, the antigen-binding domain may be multispecific or heterospecific by multimerizing with VH and VL region pairs that bind a different antigen. For example, the antibody may bind to, or interact with, (a) a cell surface antigen, (b) an Fc receptor on the surface of an effector cell, or (c) at least one other component. Accordingly, aspects may include, but are not limited to, bispecific, trispecific, tetraspecific, and other multispecific antibodies or antigen-binding fragments thereof that are directed to epitopes and to other targets, such as Fc receptors on effector cells.

[0199] In some aspects, multispecific antibodies can be used and directly linked via a short flexible polypeptide chain, using routine methods known in the art. One such example is diabodies that are bivalent, bispecific antibodies in which the VH and VL domains are expressed on a single polypeptide chain, and utilize a linker that is too short to allow for pairing between domains on the same chain, thereby forcing the domains to pair with complementary domains of another chain creating two antigen binding sites. The linker functionality is applicable for aspects of triabodies, tetrabodies, and higher order antibody multimers. (see, e.g., Hollinger et al., Proc Natl. Acad. Sci. USA 90:6444-6448 (1993); Polijak et al., Structure 2:1121-1123 (1994); Todorovska et al., J. Immunol. Methods 248:47-66 (2001)).

[0200] Bispecific diabodies, as opposed to bispecific whole antibodies, may also be advantageous because they can be readily constructed and expressed in E. coli. Diabodies (and other polypeptides such as antibody fragments) of appropriate binding specificities can be readily selected using phage display (WO94/13804) from libraries. If one arm of the diabody is kept constant, for instance, with a specificity directed against a protein, then a library can be made where the other arm is varied and an antibody of appropriate specificity selected. Bispecific whole antibodies may be made by alternative engineering methods as described in Ridgeway et al., (Protein Eng., 9:616-621, 1996) and Krah et al., (N Biotechnol. 39:167-173, 2017), each of which is hereby incorporated by reference in their entirety.

[0201] Heteroconjugate antibodies are composed of two covalently linked monoclonal antibodies with different specificities. See, e.g., U.S. Pat. No. 6,010,902, incorporated herein by reference in its entirety.

[0202] The part of the Fv fragment of an antibody molecule that binds with high specificity to the epitope of the antigen is referred to herein as the “paratope.” The paratope consists of the amino acid residues that make contact with the epitope of an antigen to facilitate antigen recognition. Each of the two Fv fragments of an antibody is composed of the two variable domains, VH and VL, in dimerized configuration. The primary structure of each of the variable domains includes three hypervariable loops separated by, and flanked by, Framework Regions (FR). The hypervariable loops are the regions of highest primary sequences variability among the antibody molecules from any mammal. The term hypervariable loop is sometimes used interchangeably with the term “Complementarity Determining Region (CDR).” The length of the hypervariable loops (or CDRs) varies between antibody molecules. The framework regions of all antibody molecules from a given mammal have high primary sequence similarity/consensus. The consensus of framework regions can be used by one skilled in the art to identify both the framework regions and the hypervariable loops (or CDRs) which are interspersed among the framework regions. The hypervariable loops are given identifying names which distinguish their position within the polypeptide, and on which domain they occur. CDRs in the VL domain are identified as L1, L2, and L3, with L1 occurring at the most distal end and L3 occurring closest to the CL domain. The CDRs may also be given the names CDR-1, CDR-2, and CDR-3. The L3 (CDR-3) is generally the region of highest variability among all antibody molecules produced by a given organism. The CDRs are regions of the polypeptide chain arranged linearly in the primary structure, and separated from each other by Framework Regions. The amino terminal (N-terminal) end of the VL chain is named FR1. The region identified as FR2 occurs between L1 and L2 hypervariable loops. FR3 occurs between L2 and L3 hypervariable loops, and the FR4 region is closest to the CL domain. This structure and nomenclature is repeated for the VH chain, which includes three CDRs identified as H1, H2 and H3. The majority of amino acid residues in the variable domains, or Fv fragments (VH and VL), are part of the framework regions (approximately 85%). The three dimensional, or tertiary, structure of an antibody molecule is such that the framework regions are more internal to the molecule and provide the majority of the structure, with the CDRs on the external surface of the molecule.

[0203] Several methods have been developed and can be used by one skilled in the art to identify the exact amino acids that constitute each of these regions. This can be done using any of a number of multiple sequence alignment methods and algorithms, which identify the conserved amino acid residues that make up the framework regions, therefore identifying the CDRs that may vary in length but are located between framework regions. Three commonly used methods have been developed for identification of the CDRs of antibodies: Kabat (as described in T. T. Wu and E. A. Kabat, “AN ANALYSIS OF THE SEQUENCES OF THE VARIABLE REGIONS OF BENCE JONES PROTEINS AND MYELOMA LIGHT CHAINS AND THEIR IMPLICATIONS FOR ANTIBODY COMPLEMENTARITY,” J Exp Med, vol. 132, no. 2, pp. 211-250, August 1970); Chothia (as described in C. Chothia et al., “Conformations of immunoglobulin hypervariable regions,” Nature, vol. 342, no. 6252, pp. 877-883, December 1989); and IMGT (as described in M.-P. Lefranc et al., “IMGT unique numbering for immunoglobulin and T cell receptor variable domains and Ig superfamily V-like domains,” Developmental & Comparative Immunology, vol. 27, no. 1, pp. 55-77, January 2003). These methods each include unique numbering systems for the identification of the amino acid residues that constitute the variable regions. In most antibody molecules, the amino acid residues that actually contact the epitope of the antigen occur in the CDRs, although in some cases, residues within the framework regions contribute to antigen binding.

[0204] One skilled in the art can use any of several methods to determine the paratope of an antibody. These methods include: 1) Computational predictions of the tertiary structure of the antibody/epitope binding interactions based on the chemical nature of the amino acid sequence of the antibody variable region and composition of the epitope; 2) Hydrogen-deuterium exchange and mass spectroscopy; 3) Polypeptide fragmentation and peptide mapping approaches in which one generates multiple overlapping peptide fragments from the full length of the polypeptide and evaluates the binding affinity of these peptides for the epitope; 4) Antibody Phage Display Library analysis in which the antibody Fab fragment encoding genes of the mammal are expressed by bacteriophage in such a way as to be incorporated into the coat of the phage. This population of Fab expressing phage are then allowed to interact with the antigen which has been immobilized or may be expressed in by a different exogenous expression system. Non-binding Fab fragments are washed away, thereby leaving only the specific binding Fab fragments attached to the antigen. The binding Fab fragments can be readily isolated and the genes which encode them determined. This approach can also be used for smaller regions of the Fab fragment including Fv fragments or specific VH and VL domains as appropriate.

[0205] In certain aspects, affinity matured antibodies are enhanced with one or more modifications in one or more CDRs thereof that result in an improvement in the affinity of the antibody for a target antigen as compared to a parent antibody that does not possess those alteration(s). Certain affinity matured antibodies will have nanomolar or picomolar affinities for the target antigen. Affinity matured antibodies are produced by procedures known in the art, e.g., Marks et al., Bio/Technology 10:779 (1992) describes affinity maturation by VH and VL domain shuffling, random mutagenesis of CDR and/or framework residues employed in phage display is described by Rajpal et al., PNAS. 24:8466-8471 (2005) and Thie et al., Methods Mol Biol. 525:309-22 (2009) in conjugation with computation methods as demonstrated in Tiller et al., Front. Immunol. 8:986 (2017).

[0206] Chimeric immunoglobulins are the products of fused genes derived from different species; “humanized” chimeras generally have the framework region (FR) from human immunoglobulins and one or more CDRs are from a non-human source.

[0207] In certain aspects, portions of the heavy and/or light chain are identical or homologous to corresponding sequences from another particular species or belonging to a particular antibody class or subclass, while the remainder of the chain(s) is identical or homologous to corresponding sequences in antibodies derived from another species or belonging to another antibody class or subclass, as well as fragments of such antibodies, so long as they exhibit the desired biological activity. U.S. Pat. No. 4,816,567; and Morrison et al., Proc. Natl. Acad. Sci. USA 81:6851 (1984). For methods relating to chimeric antibodies, see, e.g., U.S. Pat. No. 4,816,567; and Morrison et al., Proc. Natl. Acad. Sci. USA 81:6851-6855 (1985), each of which are specifically incorporated herein by reference in their entirety. CDR grafting is described, for example, in U.S. Pat. Nos. 6,180,370, 5,693,762, 5,693,761, 5,585,089, and 5,530,101, which are all hereby incorporated by reference for all purposes.

[0208] In some aspects, minimizing the antibody polypeptide sequence from the non-human species optimizes chimeric antibody function and reduces immunogenicity. Specific amino acid residues from non-antigen recognizing regions of the non-human antibody are modified to be homologous to corresponding residues in a human antibody or isotype. One example is the “CDR-grafted” antibody, in which an antibody comprises one or more CDRs from a particular species or belonging to a specific antibody class or subclass, while the remainder of the antibody chain(s) is identical or homologous to a corresponding sequence in antibodies derived from another species or belonging to another antibody class or subclass. For use in humans, the V region composed of CDR1, CDR2, and partial CDR3 for both the light and heavy chain variance region from a non-human immunoglobulin, are grafted with a human antibody framework region, replacing the naturally occurring antigen receptors of the human antibody with the non-human CDRs. In some instances, corresponding non-human residues replace framework region residues of the human immunoglobulin. Furthermore, humanized antibodies may comprise residues that are not found in the recipient antibody or in the donor antibody to further refine performance. The humanized antibody may also comprise at least a portion of an immunoglobulin constant region (Fc), typically that of a human immunoglobulin. See, e.g., Jones et al., Nature 321:522 (1986); Riechmann et al., Nature 332:323 (1988); Presta, Curr. Op. Struct. Biol. 2:593 (1992); Vaswani and Hamilton, Ann. Allergy, Asthma and Immunol. 1:105 (1998); Harris, Biochem. Soc. Transactions 23; 1035 (1995); Hurle and Gross, Curr. Op. Biotech. 5:428 (1994); Verhoeyen et al., Science 239:1534-36 (1988).

[0209] Intrabodies are intracellularly localized immunoglobulins that bind to intracellular antigens as opposed to secreted antibodies, which bind antigens in the extracellular space.

[0210] Polyclonal antibody preparations typically include different antibodies against different determinants (epitopes). In order to produce polyclonal antibodies, a host, such as a rabbit or goat, is immunized with the antigen or antigen fragment, generally with an adjuvant and, if necessary, coupled to a carrier. Antibodies to the antigen are subsequently collected from the sera of the host. The polyclonal antibody can be affinity purified against the antigen rendering it monospecific.

[0211] Monoclonal antibodies or “mAb” refer to an antibody obtained from a population of homogeneous antibodies from an exclusive parental cell, e.g., the population is identical except for naturally occurring mutations that may be present in minor amounts. Each monoclonal antibody is directed against a single antigenic determinant.

### 1. Functional Antibody Fragments and Antigen-Binding Fragments

a. Antigen-Binding Fragments

[0212] Certain aspects relate to antibody fragments, such as antibody fragments comprise the antigen-binding proteins described herein. The term functional antibody fragment includes antigen-binding fragments of an antibody that retain the ability to specifically bind to an antigen. These fragments are constituted of various arrangements of the variable region heavy chain (VH) and/or light chain (VL); and in some aspects, include constant region heavy chain 1 (CH1) and light chain (CL). In some aspects, they lack the Fc region constituted of heavy chain 2 (CH2) and 3 (CH3) domains. Aspects of antigen binding fragments and the modifications thereof may include: (i) the Fab fragment type constituted with the VL, VH, CL, and CH1 domains; (ii) the Fd fragment type constituted with the VH and CH1 domains; (iii) the Fv fragment type constituted with the VH and VL domains; (iv) the single domain fragment type, dAb, (Ward, 1989; McCafferty et al., 1990; Holt et al., 2003) constituted with a single VH or VL domain; (v) isolated complementarity determining region (CDR) regions. Such terms are described, for example, in Harlow and Lane, Antibodies: A Laboratory Manual, Cold Spring Harbor Laboratory, NY (1989); Molec. Biology and Biotechnology: A Comprehensive Desk Reference (Myers, R. A. (ed.), New York: VCH Publisher, Inc.); Huston et al., Cell Biophysics, 22:189-224 (1993); Pluckthun and Skerra, Meth. Enzymol., 178:497-515 (1989) and in Day, E. D., Advanced Immunochemistry, 2d ed., Wiley-Liss, Inc. New York, N.Y. (1990); Antibodies, 4:259-277 (2015). The citations in this paragraph are all incorporated by reference.

[0213] Antigen-binding fragments also include fragments of an antibody that retain exactly, at least, or at most 1, 2, or 3 complementarity determining regions (CDRs) from a light chain variable region. Fusions of CDR-containing sequences to an Fc region (or a CH2 or CH3 region thereof) are included within the scope of this definition including, for example, scFv fused, directly or indirectly, to an Fc region are included herein.

[0214] The term Fab fragment means a monovalent antigen-binding fragment of an antibody containing the VL, VH, CL and CH1 domains. The term Fab′ fragment means a monovalent antigen-binding fragment of a monoclonal antibody that is larger than a Fab fragment. For example, a Fab′ fragment includes the VL, VH, CL and CH1 domains and all or part of the hinge region. The term F(ab′)2 fragment means a bivalent antigen-binding fragment of a monoclonal antibody comprising two Fab′ fragments linked by a disulfide bridge at the hinge region. An F(ab′)2 fragment includes, for example, all or part of the two VH and VL domains, and can further include all or part of the two CL and CH1 domains.

[0215] The term Fd fragment means a fragment of the heavy chain of a monoclonal antibody, which includes all or part of the VH, including the CDRs. An Fd fragment can further include CH1 region sequences.

[0216] The term Fv fragment means a monovalent antigen-binding fragment of a monoclonal antibody, including all or part of the VL and VH, and absent of the CL and CH1 domains. The VL and VH include, for example, the CDRs. Single-chain antibodies (sFv or scFv) are Fv molecules in which the VL and VH regions have been connected by a flexible linker to form a single polypeptide chain, which forms an antigen-binding fragment. Single chain antibodies are discussed in detail in International Patent Application Publication No. WO 88/01649 and U.S. Pat. Nos. 4,946,778 and 5,260,203, the disclosures of which are herein incorporated by reference. The term (scFv) 2 means bivalent or bispecific sFv polypeptide chains that include oligomerization domains at their C-termini, separated from the sFv by a hinge region (Pack et al. 1992). The oligomerization domain comprises self-associating a-helices, e.g., leucine zippers, which can be further stabilized by additional disulfide bonds. (scFv) 2 fragments are also known as “miniantibodies” or “minibodies.”

[0217] A single domain antibody is an antigen-binding fragment containing only a VH or the VL domain. In some instances, two or more VH regions are covalently joined with a peptide linker to create a bivalent domain antibody. The two VH regions of a bivalent domain antibody may target the same or different antigens.

b. Fragment Crystallizable Region, Fc

[0218] An Fc region contains two heavy chain fragments comprising the CH2 and CH3 domains of an antibody. The two heavy chain fragments are held together by two or more disulfide bonds and by hydrophobic interactions of the CH3 domains. The term “Fc polypeptide” as used herein includes native and mutein forms of polypeptides derived from the Fc region of an antibody. Truncated forms of such polypeptides containing the hinge region that promotes dimerization are included. The Fc region may be removed from an antibody to generate the antigen-binding proteins described herein. Removing the Fc region may allow for the antigen-binding protein to not induce an immune response against the antigen, or cell expressing the antigen, the antigen-binding protein targets.

c. Polypeptides with Antibody CDRs & Scaffolding Domains that Display the CDRs

[0219] Antigen-binding peptide scaffolds, such as complementarity-determining regions (CDRs), are used to generate protein-binding molecules in accordance with the aspects. Generally, a person skilled in the art can determine the type of protein scaffold on which to graft at least one of the CDRs. It is known that scaffolds, optimally, must meet a number of criteria such as: good phylogenetic conservation; known three-dimensional structure; small size; few or no post-transcriptional modifications; and/or be easy to produce, express, and purify. Skerra, J Mol Recognit, 13:167-87 (2000).

[0220] The protein scaffolds can be sourced from, but not limited to: fibronectin type III FN3 domain (known as “monobodies”), fibronectin type III domain 10, lipocalin, anticalin, Z-domain of protein A of Staphylococcus aureus, thioredoxin A or proteins with a repeated motif such as the “ankyrin repeat”, the “armadillo repeat”, the “leucine-rich repeat” and the “tetratricopeptide repeat”. Such proteins are described in US Patent Publication Nos. 2010/0285564, 2006/0058510, 2006/0088908, 2005/0106660, and PCT Publication No. WO2006/056464, each of which are specifically incorporated herein by reference in their entirety. Scaffolds derived from toxins from scorpions, insects, plants, mollusks, etc., and the protein inhibiters of neuronal NO synthase (PIN) may also be used.

### III. CELLS

[0221] Certain aspects relate to cells comprising polypeptides or nucleic acids of the disclosure, such as any of the antigen-binding proteins described herein. In some aspects the cell is an immune cell or a T cell. “T cell” includes all types of immune cells expressing CD3 including T-helper cells, cytotoxic T-cells, T-regulatory cells (Treg) gamma-delta T cells, natural-killer (NK) cells, and neutrophils. The T cell may refer to a CD4+ or CD8+ T cell.

[0222] Suitable mammalian cells include primary cells and immortalized cell lines. Suitable mammalian cell lines include human cell lines, non-human primate cell lines, rodent (e.g., mouse, rat) cell lines, and the like. Suitable mammalian cell lines include, but are not limited to, HeLa cells (e.g., American Type Culture Collection (ATCC) No. CCL-2), CHO cells (e.g., ATCC Nos. CRL9618, CCL61, CRL9096), human embryonic kidney (HEK) 293 cells (e.g., ATCC No. CRL-1573), Vero cells, NIH 3T3 cells (e.g., ATCC No. CRL-1658), Huh-7 cells, BHK cells (e.g., ATCC No. CCL10), PC12 cells (ATCC No. CRL1721), COS cells, COS-7 cells (ATCC No. CRL1651), RATI cells, mouse L cells (ATCC No. CCLI.3), HLHepG2 cells, Hut-78, Jurkat, HL-60, NK cell lines (e.g., NKL, NK92, and YTS), and the like.

[0223] In some instances, the cell is not an immortalized cell line, but is instead a cell (e.g., a primary cell) obtained from an individual. For example, in some cases, the cell is an immune cell obtained from an individual. As an example, the cell is a T lymphocyte obtained from an individual. As another example, the cell is a cytotoxic cell obtained from an individual. As another example, the cell is a stem cell or progenitor cell obtained from an individual. In some aspects, the cell used in therapy of a patient is autologous. In some aspects, the cell used in therapy of a patient is non-autologous.

### IV. METHODS FOR MODIFYING GENOMIC DNA

[0224] In certain embodiments, the genomic DNA is modified either to include additional mutations, insertions, or deletions, or to integrate certain molecular contructs of the disclosure so that the constructs are expressed from the genomic DNA. In some aspects, a nucleic acid encoding a polypeptide of the disclosure is integrated into the genomic DNA of a cell. In some aspects, the integration is targeted integration. In some aspects, targeted integration is achieved through the use of a DNA digesting agent/polynucleotide modification enzyme, such as a site-specific recombinase and/or a targeting endonuclease. The term “DNA digesting agent” refers to an agent that is capable of cleaving bonds (i.e. phosphodiester bonds) between the nucleotide subunits of nucleic acids. One specific target is the TRAC (T-cell receptor alpha constant) locus. For instance, cells would first be electroporated with a ribonucleoprotein (RNP) complex consisting of Cas9 protein complexed with a single-guide RNA (sgRNA) targeting the TRAC (T-cell receptor alpha constant) locus. Fifteen minutes post electroporation, the cells would be treated with AAV6 carrying the HDR template that encodes for the CAR.

[0225] Therefore, one aspect, the current disclosure includes targeted integration. One way of achieving this is through the use of an exogenous nucleic acid sequence (i.e., a landing pad) comprising at least one recognition sequence for at least one polynucleotide modification enzyme, such as a site-specific recombinase and/or a targeting endonuclease. Site-specific recombinases are well known in the art, and may be generally referred to as invertases, resolvases, or integrases. Non-limiting examples of site-specific recombinases may include lambda integrase, Cre recombinase, FLP recombinase, gamma-delta resolvase, Tn3 resolvase, ΦC31 integrase, Bxbl-integrase, and R4 integrase. Site-specific recombinases recognize specific recognition sequences (or recognition sites) or variants thereof, all of which are well known in the art. For example, Cre recombinases recognize LoxP sites and FLP recombinases recognize FRT sites.

[0226] Contemplated targeting endonucleases include zinc finger nucleases (ZFNs), meganucleases, transcription activator-like effector nucleases (TALENs), CRIPSR/Cas-like endonucleases, I-Tev1 nucleases or related monomeric hybrids, or artificial targeted DNA double strand break inducing agents. Exemplary targeting endonucleases is further described below. For example, typically, a zinc finger nuclease comprises a DNA binding domain (i.e., zinc finger) and a cleavage domain (i.e., nuclease), both of which are described below. Also included in the definition of polynucleotide modification enzymes are any other useful fusion proteins known to those of skill in the art, such as may comprise a DNA binding domain and a nuclease.

[0227] A landing pad sequence is a nucleotide sequence comprising at least one recognition sequence that is selectively bound and modified by a specific polynucleotide modification enzyme such as a site-specific recombinase and/or a targeting endonuclease. In general, the recognition sequence(s) in the landing pad sequence does not exist endogenously in the genome of the cell to be modified. For example, where the cell to be modified is a CHO cell, the recognition sequence in the landing pad sequence is not present in the endogenous CHO genome. The rate of targeted integration may be improved by selecting a recognition sequence for a high efficiency nucleotide modifying enzyme that does not exist endogenously within the genome of the targeted cell. Selection of a recognition sequence that does not exist endogenously also reduces potential off-target integration. In other aspects, use of a recognition sequence that is native in the cell to be modified may be desirable. For example, where multiple recognition sequences are employed in the landing pad sequence, one or more may be exogenous, and one or more may be native.

[0228] One of ordinary skill in the art can readily determine sequences bound and cut by site-specific recombinases and/or targeting endonucleases.

[0229] Multiple recognition sequences may be present in a single landing pad, allowing the landing pad to be targeted sequentially by two or more polynucleotide modification enzymes such that two or more unique nucleic acids (comprising, among other things, receptor genes and/or inducible reporters) can be inserted. Alternatively, the presence of multiple recognition sequences in the landing pad, allows multiple copies of the same nucleic acid to be inserted into the landing pad. When two nucleic acids are targeted to a single landing pad, the landing pad includes a first recognition sequence for a first polynucleotide modification enzyme (such as a first ZFN pair), and a second recognition sequence for a second polynucleotide modification enzyme (such as a second ZFN pair). Alternatively, or additionally, individual landing pads comprising one or more recognition sequences may be integrated at multiple locations. Increased protein expression may be observed in cells transformed with multiple copies of a payload Alternatively, multiple gene products may be expressed simultaneously when multiple unique nucleic acid sequences comprising different expression cassettes are inserted, whether in the same or a different landing pad. Regardless of the number and type of nucleic acid, when the targeting endonuclease is a ZFN, exemplary ZFN pairs include hSIRT, hRSK4, and hAAVS1, with accompanying recognition sequences.

[0230] Generally speaking, a landing pad used to facilitate targeted integration may comprise at least one recognition sequence. For example, a landing pad may comprise at least one, at least two, at least three, at least four, at least five, at least six, at least seven, at least eight, at least nine, or at least ten or more recognition sequences. In aspects comprising more than one recognition sequence, the recognition sequences may be unique from one another (i.e. recognized by different polynucleotide modification enzymes), the same repeated sequence, or a combination of repeated and unique sequences.

[0231] One of ordinary skill in the art will readily understand that an exogenous nucleic acid used as a landing pad may also include other sequences in addition to the recognition sequence(s). For example, it may be expedient to include one or more sequences encoding selectable or screenable genes as described herein, such as antibiotic resistance genes, metabolic selection markers, or fluorescence proteins. Use of other supplemental sequences such as transcription regulatory and control elements (i.e., promoters, partial promoters, promoter traps, start codons, enhancers, introns, insulators and other expression elements) can also be present.

[0232] In addition to selection of an appropriate recognition sequence(s), selection of a targeting endonuclease with a high cutting efficiency also improves the rate of targeted integration of the landing pad(s). Cutting efficiency of targeting endonucleases can be determined using methods well-known in the art including, for example, using assays such as a CEL-1 assay or direct sequencing of insertions/deletions (Indels) in PCR amplicons.

[0233] The type of targeting endonuclease used in the methods and cells disclosed herein can and will vary. The targeting endonuclease may be a naturally-occurring protein or an engineered protein. One example of a targeting endonuclease is a zinc-finger nuclease, which is discussed in further detail below.

[0234] Another example of a targeting endonuclease that can be used is an RNA-guided endonuclease comprising at least one nuclear localization signal, which permits entry of the endonuclease into the nuclei of eukaryotic cells. The RNA-guided endonuclease also comprises at least one nuclease domain and at least one domain that interacts with a guiding RNA. An RNA-guided endonuclease is directed to a specific chromosomal sequence by a guiding RNA such that the RNA-guided endonuclease cleaves the specific chromosomal sequence. Since the guiding RNA provides the specificity for the targeted cleavage, the endonuclease of the RNA-guided endonuclease is universal and may be used with different guiding RNAs to cleave different target chromosomal sequences. Discussed in further detail below are exemplary RNA-guided endonuclease proteins. For example, the RNA-guided endonuclease can be a CRISPR/Cas protein or a CRISPR/Cas-like fusion protein, an RNA-guided endonuclease derived from a clustered regularly interspersed short palindromic repeats (CRISPR)/CRISPR-associated (Cas) system.

[0235] The targeting endonuclease can also be a meganuclease. Meganucleases are endodeoxyribonucleases characterized by a large recognition site, i.e., the recognition site generally ranges from about 12 base pairs to about 40 base pairs. As a consequence of this requirement, the recognition site generally occurs only once in any given genome. Among meganucleases, the family of homing endonucleases named “LAGLIDADG” has become a valuable tool for the study of genomes and genome engineering. Meganucleases may be targeted to specific chromosomal sequence by modifying their recognition sequence using techniques well known to those skilled in the art. See, for example, Epinat et al., 2003, Nuc. Acid Res., 31(11):2952-62 and Stoddard, 2005, Quarterly Review of Biophysics, pp. 1-47.

[0236] Yet another example of a targeting endonuclease that can be used is a transcription activator-like effector (TALE) nuclease. TALEs are transcription factors from the plant pathogen Xanthomonas that may be readily engineered to bind new DNA targets. TALEs or truncated versions thereof may be linked to the catalytic domain of endonucleases such as FokI to create targeting endonuclease called TALE nucleases or TALENs. See, e.g., Sanjana et al., 2012, Nature Protocols 7(1):171-192; Bogdanove A J, Voytas D F., 2011, Science, 333(6051):1843-6; Bradley P, Bogdanove A J, Stoddard B L., 2013, Curr Opin Struct Biol., 23(1): 93-9.

[0237] Another exemplary targeting endonuclease is a site-specific nuclease. In particular, the site-specific nuclease may be a “rare-cutter” endonuclease whose recognition sequence occurs rarely in a genome. Preferably, the recognition sequence of the site-specific nuclease occurs only once in a genome. Alternatively, the targeting nuclease may be an artificial targeted DNA double strand break inducing agent.

[0238] In some aspects, targeted integrated can be achieved through the use of an integrase. For example, The phiC31 integrase is a sequence-specific recombinase encoded within the genome of the bacteriophage phiC31. The phiC31 integrase mediates recombination between two 34 base pair sequences termed attachment sites (att), one found in the phage and the other in the bacterial host. This serine integrase has been show to function efficiently in many different cell types including mammalian cells. In the presence of phiC31 integrase, an attB-containing donor plasmid can be unidirectional integrated into a target genome through recombination at sites with sequence similarity to the native attP site (termed pseudo-attP sites). phiC31 integrase can integrate a plasmid of any size, as a single copy, and requires no cofactors. The integrated transgenes are stably expressed and heritable.

[0239] In one aspect, genomic integration of polynucleotides of the disclosure is achieved through the use of a transposase. For example, a synthetic DNA transposon (e.g. “Sleeping Beauty” transposon system) designed to introduce precisely defined DNA sequences into the chromosome of vertebrate animals can be used. The Sleeping Beauty transposon system is composed of a Sleeping Beauty (SB) transposase and a transposon that was designed to insert specific sequences of DNA into genomes of vertebrate animals. DNA transposons translocate from one DNA site to another in a simple, cut-and-paste manner. Transposition is a precise process in which a defined DNA segment is excised from one DNA molecule and moved to another site in the same or different DNA molecule or genome.

[0240] As do all other Tc1/mariner-type transposases, SB transposase inserts a transposon into a TA dinucleotide base pair in a recipient DNA sequence. The insertion site can be elsewhere in the same DNA molecule, or in another DNA molecule (or chromosome). In mammalian genomes, including humans, there are approximately 200 million TA sites. The TA insertion site is duplicated in the process of transposon integration. This duplication of the TA sequence is a hallmark of transposition and used to ascertain the mechanism in some experiments. The transposase can be encoded either within the transposon or the transposase can be supplied by another source, in which case the transposon becomes a non-autonomous element. Non-autonomous transposons are most useful as genetic tools because after insertion they cannot independently continue to excise and re-insert. All of the DNA transposons identified in the human genome and other mammalian genomes are non-autonomous because even though they contain transposase genes, the genes are non-functional and unable to generate a transposase that can mobilize the transposon.

### I. Methods of Treatment

[0241] Aspects of the current disclosure relate to methods of treating a patient that has, or will receive, a cytotoxic agent. Also contemplated are aspects that relate to methods of reducing cytotoxicity of a cytotoxic agent. The immune response stimulation may be done in vitro, in vivo, or ex vivo. The methods generally involve administering an antigen-binding protein conjugated to a protection molecule. In some aspects, the antigen-binding protein is a genetically modified mammalian cell with an expression vector, or an RNA (e.g., in vitro transcribed RNA), comprising nucleotide sequences encoding the antigen-binding protein. The cell can be an immune cell (e.g., a T lymphocyte or NK cell), a stem cell, a progenitor cell, etc. In some aspects, the cell is a cell described herein or the progeny thereof.

[0242] In some aspects, the methods relate to administration of the antigen-binding protein in combination with a treatment for cancer (or other disease treated with a cytotoxic agent) or administration to a person with a cancer (or other disease treated with a cytotoxic agent).

### II. Pharmaceutical Compositions

[0243] Administration of the compositions according to the current disclosure will typically be via any common route. This includes, but is not limited to parenteral, orthotopic, intradermal, subcutaneous, intramuscular, intraperitoneal, or intravenous injection.

[0244] Typically, compositions of the disclosure are administered in a manner compatible with the dosage formulation, and in such amount as will be therapeutically effective and immune modifying. The quantity to be administered depends on the subject to be treated. Precise amounts of active ingredient required to be administered depend on the judgment of the practitioner.

[0245] The manner of application may be varied widely. Any of the conventional methods for administration of pharmaceutical compositions comprising cellular components are applicable. The dosage of the pharmaceutical composition will depend on the route of administration and will vary according to the size and health of the subject.

[0246] In many instances, it will be desirable to have multiple administrations of at most about or at least about 2, 3, 4, 5, 6, 7, 8, 9, 10 or more. The administrations may range from 2-day to 12-month intervals, more usually from one to two week intervals. The course of the administrations may be followed by assays for alloreactive immune responses and T cell activity.

[0247] The phrases “pharmaceutically acceptable” or “pharmacologically acceptable” refer to molecular entities and compositions that do not produce an adverse, allergic, or other untoward reaction when administered to an animal, or human. As used herein, “pharmaceutically acceptable carrier” includes any and all solvents, dispersion media, coatings, antibacterial and antifungal agents, isotonic and absorption delaying agents, and the like. The use of such media and agents for pharmaceutical active substances is well known in the art. Except insofar as any conventional media or agent is incompatible with the active ingredients, its use in immunogenic and therapeutic compositions is contemplated. The pharmaceutical compositions of the current disclosure are pharmaceutically acceptable compositions.

[0248] The compositions of the disclosure can be formulated for parenteral administration, e.g., formulated for injection via the intravenous, intramuscular, sub-cutaneous, or even intraperitoneal routes. Typically, such compositions can be prepared as injectables, either as liquid solutions or suspensions and the preparations can also be emulsified.

[0249] The pharmaceutical forms suitable for injectable use include sterile aqueous solutions or dispersions; formulations including sesame oil, peanut oil, or aqueous propylene glycol. It also should be stable under the conditions of manufacture and storage and must be preserved against the contaminating action of microorganisms, such as bacteria and fungi.

[0250] Sterile injectable solutions are prepared by incorporating the active ingredients (i.e. cells of the disclosure) in the required amount in the appropriate solvent with various of the other ingredients enumerated above, as required, followed by filtered sterilization. Generally, dispersions are prepared by incorporating the various sterilized active ingredients into a sterile vehicle which contains the basic dispersion medium and the required other ingredients from those enumerated above.

[0251] An effective amount of a composition is determined based on the intended goal. The term “unit dose” or “dosage” refers to physically discrete units suitable for use in a subject, each unit containing a predetermined quantity of the composition calculated to produce the desired responses discussed herein in association with its administration, i.e., the appropriate route and regimen. The quantity to be administered, both according to number of treatments and unit dose, depends on the result and/or protection desired. Precise amounts of the composition also depend on the judgment of the practitioner and are peculiar to each individual. Factors affecting dose include physical and clinical state of the subject, route of administration, intended goal of treatment (alleviation of symptoms versus cure), and potency, stability, and toxicity of the particular composition. Upon formulation, solutions will be administered in a manner compatible with the dosage formulation and in such amount as is therapeutically or prophylactically effective. The formulations are easily administered in a variety of dosage forms, such as the type of injectable solutions described above.

### V. CYTOTOXIC AND/OR ADDITIONAL THERAPIES

[0252] The current methods and compositions of the disclosure may include one or more additional therapies known in the art and/or described herein, which may be the cytotoxic agent protected by the protection molecule. In some aspects, the cytotoxic and/or additional therapies or agents comprise an additional cancer treatment. Examples of such treatments are described herein.

### A. Immunotherapies

[0253] In some aspects, the additional therapy or agent comprises a cancer immunotherapy. Cancer immunotherapy (sometimes called immuno-oncology, abbreviated IO) is the use of the immune system to treat cancer. Immunotherapies can be categorized as active, passive or hybrid (active and passive). These approaches exploit the fact that cancer cells often have molecules on their surface that can be detected by the immune system, known as tumour-associated antigens (TAAs); they are often proteins or other macromolecules (e.g. carbohydrates). Active immunotherapy directs the immune system to attack tumor cells by targeting TAAs. Passive immunotherapies enhance existing anti-tumor responses and include the use of monoclonal antibodies, lymphocytes and cytokines. Immunotherapies are known in the art, and some are described below.

### 1. Inhibition of Co-Stimulatory Molecules

[0254] In some aspects, the immunotherapy comprises an inhibitor of a co-stimulatory molecule. In some aspects, the inhibitor comprises an inhibitor of B7-1 (CD80), B7-2 (CD86), CD28, ICOS, OX40 (TNFRSF4), 4-1BB (CD137; TNFRSF9), CD40L (CD40LG), GITR (TNFRSF18), and combinations thereof. Inhibitors include inhibitory antibodies, polypeptides, compounds, and nucleic acids.

### 2. Dendritic Cell Therapy

[0255] Dendritic cell therapy provokes anti-tumor responses by causing dendritic cells to present tumor antigens to lymphocytes, which activates them, priming them to kill other cells that present the antigen. Dendritic cells are antigen presenting cells (APCs) in the mammalian immune system. In cancer treatment they aid cancer antigen targeting. One example of cellular cancer therapy based on dendritic cells is sipuleucel-T.

[0256] One method of inducing dendritic cells to present tumor antigens is by vaccination with autologous tumor lysates or short peptides (small parts of protein that correspond to the protein antigens on cancer cells). These peptides are often given in combination with adjuvants (highly immunogenic substances) to increase the immune and anti-tumor responses. Other adjuvants include proteins or other chemicals that attract and/or activate dendritic cells, such as granulocyte macrophage colony-stimulating factor (GM-CSF).

[0257] Dendritic cells can also be activated in vivo by making tumor cells express GM-CSF. This can be achieved by either genetically engineering tumor cells to produce GM-CSF or by infecting tumor cells with an oncolytic virus that expresses GM-CSF.

[0258] Another strategy is to remove dendritic cells from the blood of a patient and activate them outside the body. The dendritic cells are activated in the presence of tumor antigens, which may be a single tumor-specific peptide/protein or a tumor cell lysate (a solution of broken down tumor cells). These cells (with optional adjuvants) are infused and provoke an immune response.

[0259] Dendritic cell therapies include the use of antibodies that bind to receptors on the surface of dendritic cells. Antigens can be added to the antibody and can induce the dendritic cells to mature and provide immunity to the tumor. Dendritic cell receptors such as TLR3, TLR7, TLR8 or CD40 have been used as antibody targets.

### 3. CAR-T Cell Therapy

[0260] Chimeric antigen receptors (CARs, also known as chimeric immunoreceptors, chimeric T cell receptors or artificial T cell receptors) are engineered receptors that combine a new specificity with an immune cell to target cancer cells. Typically, these receptors graft the specificity of a monoclonal antibody onto a T cell. The receptors are called chimeric because they are fused of parts from different sources. CAR-T cell therapy refers to a treatment that uses such transformed cells for cancer therapy.

[0261] The basic principle of CAR-T cell design involves recombinant receptors that combine antigen-binding and T-cell activating functions. The general premise of CAR-T cells is to artificially generate T-cells targeted to markers found on cancer cells. Scientists can remove T-cells from a person, genetically alter them, and put them back into the patient for them to attack the cancer cells. Once the T cell has been engineered to become a CAR-T cell, it acts as a “living drug”. CAR-T cells create a link between an extracellular ligand recognition domain to an intracellular signalling molecule which in turn activates T cells. The extracellular ligand recognition domain is usually a single-chain variable fragment (scFv). An important aspect of the safety of CAR-T cell therapy is how to ensure that only cancerous tumor cells are targeted, and not normal cells. The specificity of CAR-T cells is determined by the choice of molecule that is targeted.

[0262] Exemplary CAR-T therapies include Tisagenlecleucel (Kymriah) and Axicabtagene ciloleucel (Yescarta). In some aspects, the CAR-T therapy targets CD19.

### 4. Cytokine Therapy

[0263] Cytokines are proteins produced by many types of cells present within a tumor. They can modulate immune responses. The tumor often employs them to allow it to grow and reduce the immune response. These immune-modulating effects allow them to be used as drugs to provoke an immune response. Two commonly used cytokines are interferons and interleukins.

[0264] Interferons are produced by the immune system. They are usually involved in anti-viral response, but also have use for cancer. They fall in three groups: type I (IFNα and IFNβ), type II (IFNγ) and type III (IFNλ).

[0265] Interleukins have an array of immune system effects. IL-2 is an exemplary interleukin cytokine therapy.

### 5. Adoptive T-Cell Therapy

[0266] Adoptive T cell therapy is a form of passive immunization by the transfusion of T-cells (adoptive cell transfer). They are found in blood and tissue and usually activate when they find foreign pathogens. Specifically they activate when the T-cell's surface receptors encounter cells that display parts of foreign proteins on their surface antigens. These can be either infected cells, or antigen presenting cells (APCs). They are found in normal tissue and in tumor tissue, where they are known as tumor infiltrating lymphocytes (TILs). They are activated by the presence of APCs such as dendritic cells that present tumor antigens. Although these cells can attack the tumor, the environment within the tumor is highly immunosuppressive, preventing immune-mediated tumour death.

[0267] Multiple ways of producing and obtaining tumour targeted T-cells have been developed. T-cells specific to a tumor antigen can be removed from a tumor sample (TILs) or filtered from blood. Subsequent activation and culturing is performed ex vivo, with the results reinfused. Activation can take place through gene therapy, or by exposing the T cells to tumor antigens.

### 6. Checkpoint Inhibitors and Combination Treatment

[0268] In some aspects, the additional therapy or agent comprises immune checkpoint inhibitors. Certain aspects are further described below.

a. PD-1, PDL1, and PDL2 Inhibitors

[0269] PD-1 can act in the tumor microenvironment where T cells encounter an infection or tumor. Activated T cells upregulate PD-1 and continue to express it in the peripheral tissues. Cytokines such as IFN-gamma induce the expression of PDL1 on epithelial cells and tumor cells. PDL2 is expressed on macrophages and dendritic cells. The main role of PD-1 is to limit the activity of effector T cells in the periphery and prevent excessive damage to the tissues during an immune response. Inhibitors of the disclosure may block one or more functions of PD-1 and/or PDL1 activity.

[0270] Alternative names for “PD-1” include CD279 and SLEB2. Alternative names for “PDL1” include B7-H1, B7-4, CD274, and B7-H. Alternative names for “PDL2” include B7-DC, Btdc, and CD273. In some aspects, PD-1, PDL1, and PDL2 are human PD-1, PDL1 and PDL2.

[0271] In some aspects, the PD-1 inhibitor is a molecule that inhibits the binding of PD-1 to its ligand binding partners. In a specific aspect, the PD-1 ligand binding partners are PDL1 and/or PDL2. In another aspect, a PDL1 inhibitor is a molecule that inhibits the binding of PDL1 to its binding partners. In a specific aspect, PDL1 binding partners are PD-1 and/or B7-1. In another aspect, the PDL2 inhibitor is a molecule that inhibits the binding of PDL2 to its binding partners. In a specific aspect, a PDL2 binding partner is PD-1. The inhibitor may be an antibody, an antigen binding fragment thereof, an immunoadhesin, a fusion protein, or oligopeptide. Exemplary antibodies are described in U.S. Pat. Nos. 8,735,553, 8,354,509, and 8,008,449, all incorporated herein by reference. Other PD-1 inhibitors for use in the methods and compositions provided herein are known in the art such as described in U.S. Patent Application Nos. US2014/0294898, US2014/022021, and US2011/0008369, all incorporated herein by reference.

[0272] In some aspects, the PD-1 inhibitor is an anti-PD-1 antibody (e.g., a human antibody, a humanized antibody, or a chimeric antibody). In some aspects, the anti-PD-1 antibody is selected from the group consisting of nivolumab, pembrolizumab, and pidilizumab. In some aspects, the PD-1 inhibitor is an immunoadhesin (e.g., an immunoadhesin comprising an extracellular or PD-1 binding portion of PDL1 or PDL2 fused to a constant region (e.g., an Fc region of an immunoglobulin sequence). In some aspects, the PDL1 inhibitor comprises AMP-224. Nivolumab, also known as MDX-1106-04, MDX-1106, ONO-4538, BMS-936558, and OPDIVO®, is an anti-PD-1 antibody described in WO2006/121168. Pembrolizumab, also known as MK-3475, Merck 3475, lambrolizumab, KEYTRUDA®, and SCH-900475, is an anti-PD-1 antibody described in WO2009/114335. Pidilizumab, also known as CT-011, hBAT, or hBAT-1, is an anti-PD-1 antibody described in WO2009/101611. AMP-224, also known as B7-DCIg, is a PDL2-Fc fusion soluble receptor described in WO2010/027827 and WO2011/066342. Additional PD-1 inhibitors include MEDI0680, also known as AMP-514, and REGN2810.

[0273] In some aspects, the immune checkpoint inhibitor is a PDL1 inhibitor such as Durvalumab, also known as MEDI4736, atezolizumab, also known as MPDL3280A, avelumab, also known as MSB00010118C, MDX-1105, BMS-936559, or combinations thereof. In certain aspects, the immune checkpoint inhibitor is a PDL2 inhibitor such as rHIgM12B7.

[0274] In some aspects, the inhibitor comprises the heavy and light chain CDRs or VRs of nivolumab, pembrolizumab, or pidilizumab. Accordingly, in one aspect, the inhibitor comprises the CDR1, CDR2, and CDR3 domains of the VH region of nivolumab, pembrolizumab, or pidilizumab, and the CDR1, CDR2 and CDR3 domains of the VL region of nivolumab, pembrolizumab, or pidilizumab. In another aspect, the antibody competes for binding with and/or binds to the same epitope on PD-1, PDL1, or PDL2 as the above-mentioned antibodies. In another aspect, the antibody has at least about 70, 75, 80, 85, 90, 95, 97, or 99% (or any derivable range therein) variable region amino acid sequence identity with the above-mentioned antibodies.

b. CTLA-4, B7-1, and B7-2

[0275] Another immune checkpoint that can be targeted in the methods provided herein is the cytotoxic T-lymphocyte-associated protein 4 (CTLA-4), also known as CD152. The complete cDNA sequence of human CTLA-4 has the Genbank accession number L15006. CTLA-4 is found on the surface of T cells and acts as an “off” switch when bound to B7-1 (CD80) or B7-2 (CD86) on the surface of antigen-presenting cells. CTLA4 is a member of the immunoglobulin superfamily that is expressed on the surface of Helper T cells and transmits an inhibitory signal to T cells. CTLA4 is similar to the T-cell co-stimulatory protein, CD28, and both molecules bind to B7-1 and B7-2 on antigen-presenting cells. CTLA-4 transmits an inhibitory signal to T cells, whereas CD28 transmits a stimulatory signal. Intracellular CTLA-4 is also found in regulatory T cells and may be important to their function. T cell activation through the T cell receptor and CD28 leads to increased expression of CTLA-4, an inhibitory receptor for B7 molecules. Inhibitors of the disclosure may block one or more functions of CTLA-4, B7-1, and/or B7-2 activity. In some aspects, the inhibitor blocks the CTLA-4 and B7-1 interaction. In some aspects, the inhibitor blocks the CTLA-4 and B7-2 interaction.

[0276] In some aspects, the immune checkpoint inhibitor is an anti-CTLA-4 antibody (e.g., a human antibody, a humanized antibody, or a chimeric antibody), an antigen binding fragment thereof, an immunoadhesin, a fusion protein, or oligopeptide.

[0277] Anti-human-CTLA-4 antibodies (or VH and/or VL domains derived therefrom) suitable for use in the present methods can be generated using methods well known in the art. Alternatively, art recognized anti-CTLA-4 antibodies can be used. For example, the anti-CTLA-4 antibodies disclosed in: U.S. Pat. No. 8,119,129, WO 01/14424, WO 98/42752; WO 00/37504 (CP675,206, also known as tremelimumab; formerly ticilimumab), U.S. Pat. No. 6,207,156; Hurwitz et al., 1998; can be used in the methods disclosed herein. The teachings of each of the aforementioned publications are hereby incorporated by reference. Antibodies that compete with any of these art-recognized antibodies for binding to CTLA-4 also can be used. For example, a humanized CTLA-4 antibody is described in International Patent Application No. WO2001/014424, WO2000/037504, and U.S. Pat. No. 8,017,114; all incorporated herein by reference.

[0278] A further anti-CTLA-4 antibody useful as a checkpoint inhibitor in the methods and compositions of the disclosure is ipilimumab (also known as 10D1, MDX-010, MDX-101, and Yervoy®) or antigen binding fragments and variants thereof (see, e.g., WO0 1/14424).

[0279] In some aspects, the inhibitor comprises the heavy and light chain CDRs or VRs of tremelimumab or ipilimumab. Accordingly, in one aspect, the inhibitor comprises the CDR1, CDR2, and CDR3 domains of the VH region of tremelimumab or ipilimumab, and the CDR1, CDR2 and CDR3 domains of the VL region of tremelimumab or ipilimumab. In another aspect, the antibody competes for binding with and/or binds to the same epitope on PD-1, B7-1, or B7-2 as the above-mentioned antibodies. In another aspect, the antibody has at least about 70, 75, 80, 85, 90, 95, 97, or 99% (or any derivable range therein) variable region amino acid sequence identity with the above-mentioned antibodies.

### B. Oncolytic Virus

[0280] In some aspects, the additional therapy or agent comprises an oncolytic virus. An oncolytic virus is a virus that preferentially infects and kills cancer cells. As the infected cancer cells are destroyed by oncolysis, they release new infectious virus particles or virions to help destroy the remaining tumour. Oncolytic viruses are thought not only to cause direct destruction of the tumour cells, but also to stimulate host anti-tumour immune responses for long-term immunotherapy

### C. Polysaccharides

[0281] In some aspects, the additional therapy or agent comprises polysaccharides. Certain compounds found in mushrooms, primarily polysaccharides, can up-regulate the immune system and may have anti-cancer properties. For example, beta-glucans such as lentinan have been shown in laboratory studies to stimulate macrophage, NK cells, T cells and immune system cytokines and have been investigated in clinical trials as immunologic adjuvants.

### D. Neoantigens

[0282] In some aspects, the additional therapy or agent comprises neoantigen administration. Many tumors express mutations. These mutations potentially create new targetable antigens (neoantigens) for use in T cell immunotherapy. The presence of CD8+ T cells in cancer lesions, as identified using RNA sequencing data, is higher in tumors with a high mutational burden. The level of transcripts associated with cytolytic activity of natural killer cells and T cells positively correlates with mutational load in many human tumors.

### E. Chemotherapies

[0283] In some aspects, the additional therapy or agent or agent comprises a chemotherapy. Suitable classes of chemotherapeutic agents include (a) Alkylating Agents, such as nitrogen mustards (e.g., mechlorethamine, cylophosphamide, ifosfamide, melphalan, chlorambucil), ethylenimines and methylmelamines (e.g., hexamethylmelamine, thiotepa), alkyl sulfonates (e.g., busulfan), nitrosoureas (e.g., carmustine, lomustine, chlorozoticin, streptozocin) and triazines (e.g., dicarbazine), (b) Antimetabolites, such as folic acid analogs (e.g., methotrexate), pyrimidine analogs (e.g., 5-fluorouracil, floxuridine, cytarabine, azauridine) and purine analogs and related materials (e.g., 6-mercaptopurine, 6-thioguanine, pentostatin), (c) Natural Products, such as vinca alkaloids (e.g., vinblastine, vincristine), epipodophylotoxins (e.g., etoposide, teniposide), antibiotics (e.g., dactinomycin, daunorubicin, doxorubicin, bleomycin, plicamycin and mitoxanthrone), enzymes (e.g., L-asparaginase), and biological response modifiers (e.g., Interferon-α), and (d) Miscellaneous Agents, such as platinum coordination complexes (e.g., cisplatin, carboplatin), substituted ureas (e.g., hydroxyurea), methylhydiazine derivatives (e.g., procarbazine), and adreocortical suppressants (e.g., taxol and mitotane). In some aspects, cisplatin is a particularly suitable chemotherapeutic agent.

[0284] Cisplatin has been widely used to treat cancers such as, for example, metastatic testicular or ovarian carcinoma, advanced bladder cancer, head or neck cancer, cervical cancer, lung cancer or other tumors. Cisplatin is not absorbed orally and must therefore be delivered via other routes such as, for example, intravenous, subcutaneous, intratumoral or intraperitoneal injection. Cisplatin can be used alone or in combination with other agents, with efficacious doses used in clinical applications including about 15 mg/m2 to about 20 mg/m2 for 5 days every three weeks for a total of three courses being contemplated in certain aspects. In some aspects, the amount of cisplatin delivered to the cell and/or subject in conjunction with the construct comprising an Egr-1 promoter operably linked to a polynucleotide encoding the therapeutic polypeptide is less than the amount that would be delivered when using cisplatin alone.

[0285] Other suitable chemotherapeutic agents include antimicrotubule agents, e.g., Paclitaxel (“Taxol”) and doxorubicin hydrochloride (“doxorubicin”). The combination of an Egr-1 promoter/TNFα construct delivered via an adenoviral vector and doxorubicin was determined to be effective in overcoming resistance to chemotherapy and/or TNF-α, which suggests that combination treatment with the construct and doxorubicin overcomes resistance to both doxorubicin and TNF-α.

[0286] Doxorubicin is absorbed poorly and is preferably administered intravenously. In certain aspects, appropriate intravenous doses for an adult include about 60 mg/m2 to about 75 mg/m2 at about 21-day intervals or about 25 mg/m2 to about 30 mg/m2 on each of 2 or 3 successive days repeated at about 3 week to about 4 week intervals or about 20 mg/m2 once a week. The lowest dose should be used in elderly patients, when there is prior bone-marrow depression caused by prior chemotherapy or neoplastic marrow invasion, or when the drug is combined with other myelopoietic suppressant drugs.

[0287] Nitrogen mustards are another suitable chemotherapeutic agent useful in the methods of the disclosure. A nitrogen mustard may include, but is not limited to, mechlorethamine (HN2), cyclophosphamide and/or ifosfamide, melphalan (L-sarcolysin), and chlorambucil. Cyclophosphamide (CYTOXAN®) is available from Mead Johnson and NEOSTAR® is available from Adria), is another suitable chemotherapeutic agent. Suitable oral doses for adults include, for example, about 1 mg/kg/day to about 5 mg/kg/day, intravenous doses include, for example, initially about 40 mg/kg to about 50 mg/kg in divided doses over a period of about 2 days to about 5 days or about 10 mg/kg to about 15 mg/kg about every 7 days to about 10 days or about 3 mg/kg to about 5 mg/kg twice a week or about 1.5 mg/kg/day to about 3 mg/kg/day. Because of adverse gastrointestinal effects, the intravenous route is preferred. The drug also sometimes is administered intramuscularly, by infiltration or into body cavities.

[0288] Additional suitable chemotherapeutic agents include pyrimidine analogs, such as cytarabine (cytosine arabinoside), 5-fluorouracil (fluouracil; 5-FU) and floxuridine (fluorode-oxyuridine; FudR). 5-FU may be administered to a subject in a dosage of anywhere between about 7.5 to about 1000 mg/m2. Further, 5-FU dosing schedules may be for a variety of time periods, for example up to six weeks, or as determined by one of ordinary skill in the art to which this disclosure pertains.

[0289] Gemcitabine diphosphate (GEMZAR®, Eli Lilly & Co., “gemcitabine”), another suitable chemotherapeutic agent, is recommended for treatment of advanced and metastatic pancreatic cancer, and will therefore be useful in the present disclosure for these cancers as well.

[0290] The amount of the chemotherapeutic agent delivered to the patient may be variable. In one suitable aspect, the chemotherapeutic agent may be administered in an amount effective to cause arrest or regression of the cancer in a host, when the chemotherapy is administered with the construct. In other aspects, the chemotherapeutic agent may be administered in an amount that is anywhere between 2 to 10,000 fold less than the chemotherapeutic effective dose of the chemotherapeutic agent. For example, the chemotherapeutic agent may be administered in an amount that is about 20 fold less, about 500 fold less or even about 5000 fold less than the chemotherapeutic effective dose of the chemotherapeutic agent. The chemotherapeutics of the disclosure can be tested in vivo for the desired therapeutic activity in combination with the construct, as well as for determination of effective dosages. For example, such compounds can be tested in suitable animal model systems prior to testing in humans, including, but not limited to, rats, mice, chicken, cows, monkeys, rabbits, etc. In vitro testing may also be used to determine suitable combinations and dosages, as described in the examples.

### F. Radiotherapy

[0291] In some aspects, the additional therapy or agent or prior therapy comprises radiation, such as ionizing radiation. As used herein, “ionizing radiation” means radiation comprising particles or photons that have sufficient energy or can produce sufficient energy via nuclear interactions to produce ionization (gain or loss of electrons). An exemplary and preferred ionizing radiation is an x-radiation. Means for delivering x-radiation to a target tissue or cell are well known in the art.

[0292] In some aspects, the amount of ionizing radiation is greater than 20 Gy and is administered in one dose. In some aspects, the amount of ionizing radiation is 18 Gy and is administered in three doses. In some aspects, the amount of ionizing radiation is at least, at most, or exactly 2, 4, 6, 8, 10, 15, 16, 17, 18, 19, 20, 21, 22, 23, 24, 25, 26, 27, 18, 19, 30, 31, 32, 33, 34, 35, 36, 37, 38, 39, 40, 41, 42, 43, 44, 45, 46, 47, 48, 49, or 40 Gy (or any derivable range therein). In some aspects, the ionizing radiation is administered in at least, at most, or exactly 1, 2, 3, 4, 5, 6, 7, 8, 9, or 10 does (or any derivable range therein). When more than one dose is administered, the does may be about 1, 4, 8, 12, or 24 hours or 1, 2, 3, 4, 5, 6, 7, or 8 days or 1, 2, 3, 4, 5, 6, 7, 8, 9, 10, 12, 14, or 16 weeks apart, or any derivable range therein.

[0293] In some aspects, the amount of IR may be presented as a total dose of IR, which is then administered in fractionated doses. For example, in some aspects, the total dose is 50 Gy administered in 10 fractionated doses of 5 Gy each. In some aspects, the total dose is 50-90 Gy, administered in 20-60 fractionated doses of 2-3 Gy each. In some aspects, the total dose of IR is at least, at most, or about 20, 21, 22, 23, 24, 25, 26, 27, 28, 29, 30, 31, 32, 33, 34, 35, 36, 37, 38, 39, 40, 41, 42, 43, 44, 45, 46, 47, 48, 49, 50, 51, 52, 53, 54, 55, 56, 57, 58, 59, 60, 61, 62, 63, 64, 65, 66, 67, 68, 69, 70, 71, 72, 73, 74, 75, 76, 77, 78, 79, 80, 81, 82, 83, 84, 85, 86, 87, 88, 89, 90, 91, 92, 93, 94, 95, 96, 97, 98, 99, 100, 101, 102, 103, 104, 105, 106, 107, 108, 109, 110, 111, 112, 113, 114, 115, 116, 117, 118, 119, 120, 125, 130, 135, 140, or 150 (or any derivable range therein). In some aspects, the total dose is administered in fractionated doses of at least, at most, or exactly 1, 2, 3, 4, 5, 6, 7, 8, 9, 10, 12, 14, 15, 20, 25, 30, 35, 40, 45, or 50 Gy (or any derivable range therein. In some aspects, at least, at most, or exactly 2, 3, 4, 5, 6, 7, 8, 9, 10, 11, 12, 13, 14, 15, 16, 17, 18, 19, 20, 21, 22, 23, 24, 25, 26, 27, 28, 29, 30, 31, 32, 33, 34, 35, 36, 37, 38, 39, 40, 41, 42, 43, 44, 45, 46, 47, 48, 49, 50, 51, 52, 53, 54, 55, 56, 57, 58, 59, 60, 61, 62, 63, 64, 65, 66, 67, 68, 69, 70, 71, 72, 73, 74, 75, 76, 77, 78, 79, 80, 81, 82, 83, 84, 85, 86, 87, 88, 89, 90, 91, 92, 93, 94, 95, 96, 97, 98, 99, or 100 fractionated doses are administered (or any derivable range therein). In some aspects, at least, at most, or exactly 1, 2, 3, 4, 5, 6, 7, 8, 9, 10, 11, or 12 (or any derivable range therein) fractionated doses are administered per day. In some aspects, at least, at most, or exactly 1, 2, 3, 4, 5, 6, 7, 8, 9, 10, 11, 12, 13, 14, 15, 16, 17, 18, 19, 20, 21, 22, 23, 24, 25, 26, 27, 28, 29, or 30 (or any derivable range therein) fractionated doses are administered per week.

### G. Surgery

[0294] Approximately 60% of persons with cancer will undergo surgery of some type, which includes preventative, diagnostic or staging, curative, and palliative surgery. Curative surgery includes resection in which all or part of cancerous tissue is physically removed, excised, and/or destroyed and may be used in conjunction with other therapies, such as the treatment of the present aspects, chemotherapy, radiotherapy, hormonal therapy, gene therapy, immunotherapy, and/or alternative therapies. Tumor resection refers to physical removal of at least part of a tumor. In addition to tumor resection, treatment by surgery includes laser surgery, cryosurgery, electrosurgery, and microscopically-controlled surgery (Mohs' surgery).

[0295] Upon excision of part or all of cancerous cells, tissue, or tumor, a cavity may be formed in the body. Treatment may be accomplished by perfusion, direct injection, or local application of the area with an additional anti-cancer therapy. Such treatment may be repeated, for example, every 1, 2, 3, 4, 5, 6, or 7 days, or every 1, 2, 3, 4, and 5 weeks or every 1, 2, 3, 4, 5, 6, 7, 8, 9, 10, 11, or 12 months. These treatments may be of varying dosages as well.

### H. Other Agents

[0296] It is contemplated that other agents may be used in combination with certain aspects of the present aspects to improve the therapeutic efficacy of treatment. These additional agents include agents that affect the upregulation of cell surface receptors and GAP junctions, cytostatic and differentiation agents, inhibitors of cell adhesion, agents that increase the sensitivity of the hyperproliferative cells to apoptotic inducers, or other biological agents. Increases in intercellular signaling by elevating the number of GAP junctions would increase the anti-hyperproliferative effects on the neighboring hyperproliferative cell population. In other aspects, cytostatic or differentiation agents can be used in combination with certain aspects of the present aspects to improve the anti-hyperproliferative efficacy of the treatments. Inhibitors of cell adhesion are contemplated to improve the efficacy of the present aspects. Examples of cell adhesion inhibitors are focal adhesion kinase (FAKs) inhibitors and Lovastatin. It is further contemplated that other agents that increase the sensitivity of a hyperproliferative cell to apoptosis, such as the antibody c225, could be used in combination with certain aspects of the present aspects to improve the treatment efficacy.

### VI. ADMINISTRATION OF THERAPEUTIC COMPOSITIONS

[0297] Methods of the disclosure include administration of a combination of therapeutic agents and/or administration of therapeutic agents, such as the antigen-binding protein described herein and cytotoxic agent, for example. The therapy may be administered in any suitable manner known in the art. For example, the therapies may be administered sequentially (at different times) or concurrently (at the same time). In some aspects, the therapies are in a separate composition. In some aspects, the therapies are in the same composition.

[0298] Various combinations of the therapies may be employed, for example, one therapy designated “A” and another thapy designated “B”:

A/B/A B/A/B B/B/A A/A/B A/B/B B/A/A A/B/B/B B/A/B/B
B/B/B/A B/B/A/B A/A/B/B A/B/A/B A/B/B/A B/B/A/A
B/A/B/A B/A/A/B A/A/A/B B/A/A/A A/B/A/A A/A/B/A

[0299] The therapies of the disclosure may be administered by the same route of administration or by different routes of administration. In some aspects, the therapy is administered intracolonically, intravenously, intramuscularly, subcutaneously, topically, orally, transdermally, intraperitoneally, intraorbitally, by implantation, by inhalation, intrathecally, intraventricularly, or intranasally. In some aspects, the microbial modulator is administered intravenously, intramuscularly, subcutaneously, topically, orally, transdermally, intraperitoneally, intraorbitally, by implantation, by inhalation, intrathecally, intraventricularly, or intranasally.

[0300] The quantity to be administered, both according to number of treatments and unit dose, depends on the treatment effect desired. An effective dose is understood to refer to an amount necessary to achieve a particular effect. In the practice in certain aspects, it is contemplated that doses in the range from 10 mg/kg to 200 mg/kg can affect the protective capability of these agents. Thus, it is contemplated that doses include doses of about 0.1, 0.5, 1, 5, 10, 15, 20, 25, 30, 35, 40, 45, 50, 55, 60, 65, 70, 75, 80, 85, 90, 100, 105, 110, 115, 120, 125, 130, 135, 140, 145, 150, 155, 160, 165, 170, 175, 180, 185, 190, 195, and 200, 300, 400, 500, 1000 μg/kg, mg/kg, μg/day, or mg/day or any range derivable therein. Furthermore, such doses can be administered at multiple times during a day, and/or on multiple days, weeks, or months.

[0301] In some aspects, the therapeutically effective or sufficient amount of a therapeutic composition that is administered to a human will be in the range of about 0.01 to about 50 mg/kg of patient body weight whether by one or more administrations. In some aspects, the therapeutic agent used is about 0.01 to about 45 mg/kg, about 0.01 to about 40 mg/kg, about 0.01 to about 35 mg/kg, about 0.01 to about 30 mg/kg, about 0.01 to about 25 mg/kg, about 0.01 to about 20 mg/kg, about 0.01 to about 15 mg/kg, about 0.01 to about 10 mg/kg, about 0.01 to about 5 mg/kg, or about 0.01 to about 1 mg/kg administered daily, for example. In some aspects, the therapeutic agent is administered at 15 mg/kg. However, other dosage regimens may be useful. In one aspect, a therapeutic agent described herein is administered to a subject at a dose of about 100 mg, about 200 mg, about 300 mg, about 400 mg, about 500 mg, about 600 mg, about 700 mg, about 800 mg, about 900 mg, about 1000 mg, about 1100 mg, about 1200 mg, about 1300 mg or about 1400 mg on day 1 of 21-day cycles. The dose may be administered as a single dose or as multiple doses (e.g., 2 or 3 doses), such as infusions. The progress of this therapy is easily monitored by conventional techniques.

[0302] In certain aspects, the effective dose of the pharmaceutical composition is one which can provide a blood level of about 1 μM to 150 μM. In another aspect, the effective dose provides a blood level of about 4 μM to 100 μM.; or about 1 μM to 100 μM; or about 1 μM to 50μ; or about 1μ M to 40μ; or about 1μ M to 30μ; or about 1μ M to 20μ; or about 1 μM to 10 μM; or about 10 μM to 150 μM; or about 10 μM to 100 μM; or about 10 μM to 50 μM; or about 25 μM to 150 μM; or about 25 μM to 100 μM; or about 25 μM to 50 μM; or about 50 μM to 150 μM; or about 50 μM to 100 μM (or any range derivable therein). In other aspects, the dose can provide the following blood level of the agent that results from a therapeutic agent being administered to a subject: about, at least about, or at most about 1, 2, 3, 4, 5, 6, 7, 8, 9, 10, 11, 12, 13, 14, 15, 16, 17, 18, 19, 20, 21, 22, 23, 24, 25, 26, 27, 28, 29, 30, 31, 32, 33, 34, 35, 36, 37, 38, 39, 40, 41, 42, 43, 44, 45, 46, 47, 48, 49, 50, 51, 52, 53, 54, 55, 56, 57, 58, 59, 60, 61, 62, 63, 64, 65, 66, 67, 68, 69, 70, 71, 72, 73, 74, 75, 76, 77, 78, 79, 80, 81, 82, 83, 84, 85, 86, 87, 88, 89, 90, 91, 92, 93, 94, 95, 96, 97, 98, 99, or 100 μM or any range derivable therein. In certain aspects, the therapeutic agent that is administered to a subject is metabolized in the body to a metabolized therapeutic agent, in which case the blood levels may refer to the amount of that agent. Alternatively, to the extent the therapeutic agent is not metabolized by a subject, the blood levels discussed herein may refer to the unmetabolized therapeutic agent.

[0303] Precise amounts of the therapeutic composition also depend on the judgment of the practitioner and are peculiar to each individual. Factors affecting dose include physical and clinical state of the patient, the route of administration, the intended goal of treatment (alleviation of symptoms versus cure) and the potency, stability and toxicity of the particular therapeutic substance or other therapies a subject may be undergoing.

[0304] It will be understood by those skilled in the art and made aware that dosage units of μg/kg or mg/kg of body weight can be converted and expressed in comparable concentration units of μg/ml or mM (blood levels), such as 4 μM to 100 μM. It is also understood that uptake is species and organ/tissue dependent. The applicable conversion factors and physiological assumptions to be made concerning uptake and concentration measurement are well-known and would permit those of skill in the art to convert one concentration measurement to another and make reasonable comparisons and conclusions regarding the doses, efficacies and results described herein.

### VII. KITS

[0305] Certain aspects of the disclosure also encompass kits for performing the methods of the disclosure. Kits may comprise a container with a label. Suitable containers include, for example, bottles, vials, and test tubes. The containers may be formed from a variety of materials such as glass or plastic. The container may hold a composition which includes a probe that is useful for prognostic or non-prognostic applications, such as described above. The label on the container may indicate that the composition is used for a specific prognostic or non-prognostic application, and may also indicate directions for either in vivo or in vitro use, such as those described above. The kit may comprise the container described above and one or more other containers comprising materials desirable from a commercial and user standpoint, including buffers, diluents, filters, needles, syringes, and package inserts with instructions for use.

[0306] Further kit aspects relate to kits comprising the therapeutic compositions of the disclosure. The kits may be useful in the treatment methods of the disclosure and comprise instructions for use.

### VIII. EXAMPLES

[0307] The following examples are included to demonstrate preferred embodiments of the invention. It should be appreciated by those of skill in the art that the techniques disclosed in the examples which follow represent techniques discovered by the inventor to function well in the practice of the invention, and thus can be considered to constitute preferred modes for its practice. However, those of skill in the art should, in light of the present disclosure, appreciate that many changes can be made in the specific embodiments which are disclosed and still obtain a like or similar result without departing from the spirit and scope of the invention.

### Example 1

[0308] Described herein are strategies for cancer treatment that widens the therapeutic window of chemotherapy by directly and selectively protecting healthy tissues from cytotoxic drugs. The approach, in certain embodiments called molecularly-targeted chemoprotection (MTC), inverts the targeted therapy paradigm to instead deliver chemoprotective compounds to cells expressing molecular markers of healthy tissues prior to chemotherapy (FIG. 1B). Stem and progenitor cells are particularly critical for tissue maintenance and highly susceptible to cytotoxic therapy. With prudent selection of molecular markers to target, these cells can be protected from cytotoxic drugs more so than malignant cells. Targeting mechanisms can be configured, such as the use of antibodies (monoclonal or polyclonal), aptamers, or affimers. The mechanism of chemoprotection can also be tailored to different diseases and treatments, such as the use of drug-degrading enzymes, drug sequestrants, or nanoparticles of “antidote”. This flexible strategy widens the therapeutic window of cytotoxic drugs, making chemotherapy more tolerable for patients and enabling the use of higher-intensity treatment regimens to more completely and expeditiously treat cancer.

[0309] An example of MTC (FIGS. 1A-1B) uses an antibody fragment targeted against CD34-expressing cells that is covalently conjugated to cytidine deaminase (CDA), an enzyme that degrades gemcitabine (a commonly prescribed cytotoxic chemotherapy). CD34 is expressed on many stem and progenitor cells with low expression on solid tumors, altogether making it a strong candidate for targeted protection. The use of a CD34-recognizing antibody fragment without an Fc region ensures that the conjugate will not induce an immune response against the targeted healthy tissue. The conjugate can be administered prior to gemcitabine therapy, enriching levels of cytidine deaminase in CD34+ tissues. This approach widens the therapeutic window to make higher gemcitabine doses more tolerable for patients.

[0310] CDA and anti-CD34 antibodies can be produced recombinantly, either as separate products or as a fusion protein. In one example, copper-free click chemistry was with NHS ester functionalization of primary amines on the two molecules to produce a CD34-targeted chemoprotective conjugate for use in in vitro experiments (FIG. 2C). To validate, the unconjugated CDA in solution was able to protect a mammalian cell line from gemcitabine toxicity to levels indistinguishable from the negative control (FIG. 3A). For validation of targeted protection, two cell lines were used, one expressing CD34 (TF-la, derived from leukemia cells) and one expressing EpCAM (BxPC-3, derived from pancreatic cancer). The anti-CD34 and anti-EpCAM (control) antibodies that were obtained can indeed distinguish between these two cell lines (FIG. 3B). The generated conjugates were analyzed in a cytidine deaminase activity assay, and compared to unconjugated CDA. The antibody conjugates were purified with size-exclusion at a nominal 100 kDa MWCO, which is considerably larger than CDA (even in its multimeric forms). So all unconjugated CDA was removed for these samples. As shown in FIG. 4, the antibody conjugates had activity equivalent to unconjugated CDA.

### Example 2

[0311] CD117 is a receptor commonly found on the surface of hematopoietic stem and progenitor cells and has been used in literature to specifically ablate bone marrow cells prior to bone marrow transplantation such as in Czechowicz et al. 2019 and Pang et al. 2019. CDA is an important enzyme in the pyrimidine salvaging pathway and is known to deaminase cytidine/deoxycytidine (and their analogs) into uridine/deoxyuridine. Therefore, it can deaminate and therefore inactivate gemcitabine, a deoxyctidine analog used as a common chemotherapeutic. By fusing the scFv with the CDA, the enzyme can be delivered specifically to HSPCs prior to gemcitabine administration, leading to protection of the HSPCs from chemotherapy-induced killing. With the protection of HSPCs, the inventors expect to prevent myelosuppression, one of the most common side effects of chemotherapy. Depletion of the HSPCs also leads to reduction in downstream cell lineages in chemotherapy patients and therefore manifests as neutropenia (decreased white blood cells), anemia (decreased red blood cells), thrombocytopenia (decreased platelets) and lymphopenia (decreased lymphocytes). By protecting the HSPCs, reduction in these cell populations may be prevented as well as alleviation of a wide range of side effects caused by chemotherapy.

[0312] A fusion protein comprised of a single chain variable fragment (scFv) of the human CD117 (i.e. stem cell factor receptor) antibody and the enzyme cytidine deaminase (CDA) is described herein. The scFv sequence includes the heavy and light variable regions of CD117 antibody which are connected to each other through a glycine-serine linker (FIGS. 5-6). The scFv is then followed by a second linker that separates it from the human cytidine deaminase sequence (FIGS. 5-6). The inventors used a glycine-serine linker again between the scFv and the CDA, therefore producing the fusion protein with one plasmid in one expression system. However, the fusion protein can also be developed by producing the scFv and CDA separately with either chemical modifications on each to facilitate conjugation (which includes but is not limited to adding a click chemistry handle on one protein and an alkyne group on the other) or by adding additional cognate sequences to our proteins such as biotin and avidin or SpyTag and SpyCatcher.

[0313] In some aspects, for purification purposes, the fusion protein is flanked with a 6×Histidine tag, a commonly used molecule for pulldown of proteins. Though the inventors have initially kept the histidine tag, it can be easily removed by the addition of a protease cleavage site to the sequence before the tag, which can then be cleaved chemically with the corresponding protease. The fusion protein was recombinantly produced in E. coli, but may be produced in mammalian cells or cell-free in vitro transcription and translation systems. The fusion protein was purified initially with a Nickel resin column that binds the 6×Histidine tag and can be further purified, if necessary, with HPLC.

[0314] First, to check that there were cancer cell lines negative for CD117, the inventors used flow cytometry on several cell lines. Hematopoietic stem and progenitor cells showed high levels of CD117 expression whereas ovarian cancer cell line IE9mp1, breast cancer cell line EMT6, and pancreatic cancer cell line Panc02 showed no CD117 expression, making CD117 a good candidate for targeting hematopoietic stem and progenitor cells (FIG. 7).

[0315] Next, the inventors tested for whether cytidine deaminase can inactivate gemcitabine extracellularly. Cell viabilities of EML cells treated with various concentrations of free CDA were measured by MTS assay, which showed increased IC50 of the cells when CDA is added to the extracellular space (FIG. 8). The inventors concluded that extracellular CDA can reduce gemcitabine-mediated cell killing and protection against gemcitabine is extracellular CDA dose-dependent. This indicated that when the fusion protein with CDA is in the extracellular space, it may be able to inactivate gemcitabine without the need to be internalized.

[0316] To further characterize the fusion protein, the inventors confirmed that the purified sample from T7 Shuttle bacteria showed good yield of the fusion protein (FIGS. 9A-9C) then characterized the fusion protein for its binding to CD117 by using indirect ELISA to produce a Kd value (FIG. 9D). During the purification, minimal fusion protein was lost in the wash steps and most of the protein was obtained in the elution steps (FIG. 9B). The fusion protein obtained from the purification was ˜1.5 μg/mL (FIG. 9C). For the binding of the fusion protein to the CD117, the affinity may be improved by testing different scFv sequences. Furthermore, the CDA activity of T7 Shuttle eluted fraction was tested by measuring the O.D.₆₃₀, which indicates the production amount of ammonia (FIG. 9E).

### Example 3

[0317] In this example, the inventors designed and produced a fusion protein including the single chain variable fragment (scFv) (scFv sequence from WO2020219775A1) of human CD117 antibody with the cytidine deaminase (CDA) enzyme. A 6×Histidine tag followed the fusion protein for easier purification. The contructed protein was produced in E. coli, specifically T7 Shuffle cells, then purified using a Nickel His-Trap column. In some instances, the E. coli were induced under different conditions, including 30° C. for 4 hours, 25° C. for 24 hours, and 30° C. for 4 hours and 25° C. for 20 hours. Lysate from uninduced E. coli was used as a negative control.

[0318] To confirm the production of the fusion protein in T7 Shuffle cells, a Western blot was performed by using an anti-6×Histidine antibody. The fusion protein was expected to have a size between 45-50 kDa. All three induction conditions produced high amounts of the fusion protein, which was detected at 48 kDa (FIG. 10).

[0319] The ability for the fusion protein to bind the target CD117 was also tested. An indirect ELISA against CD117 was used to confirm the binding of the fusion protein to CD117. Uninduced lysate was used as negative control and about 4 times higher signal was observed from the induced lysates (FIG. 11).

### Example 4

[0320] The activity of CDA in a fusion protein may be measured, for example, by evaluating the level of the fusion protein deaminating cytidine to uridine. One method is to observe a shift in the absorbance spectra from 271 nm to 262 nm which are indicative peaks of cytidine to uridine (FIG. 12).

[0321] Another method to evaluate the activity of CDA is by measuring the production of ammonia which results from the deamination of cytidine to uridine. The indophenol method for a kinetic assay and produce kcat and Km values from which the catalytic power of the enzyme can be obtained.

### Example 5

[0322] The inventors conducted another set of experiments, showing production of three proteins scFv-His, CDA-His and scFv-CDA-His in two strains of E. coli BL21 DE3 and T7 Shuffle cells. Different induction durations, 4 hours, 7 hours and overnight, at different induction temperatures, 30 C and 37 C, were tested. The purpose of these experiments were to identify conditions at which both scFv and CDA are active when produced alone.

[0323] First, the inventors sought to improve recombinant protein production and purity in BL21 DE3 and T7 Shuffle cells. scFv-His, CDA-His, and scFv-CDA-His were induced in the cells for 4 hours, 7 hours, or overnight, at 37° C. or 30° C. (FIGS. 15A-15D). scFv-His was produced at both 37° C. and 30° C. in BL21 DE3, however a higher yield was shown for those induced at 30° C. There was no visible difference between the different induction times (FIG. 15A). CDA-His was produced both at 37° C. and 30° C. in BL21 DE3, with similar yields shown at both temperatures and all induction durations (FIG. 15B). Production of scFv-CDA-His in BL21 DE3 and T7 Shuffle was inconclusive due to lack of unique bands (FIGS. 15C, 15D). scFv-His was produced at 30° C. in T7 Shuffle, with higher yield shown with overnight induction compared to 4 hours of induction. CDA-His is produced at 30° C. in T7 Shuffle, with no visible effect of induction time.

[0324] Next, the produced recombinant proteins were purified by using nickel magnetic beads, then the eluted fractions were assessed by using SDS-PAGE (FIGS. 16A-16C). The purification yielded high scFv-His production in BL21 DE3 at 37° C. only for 4 hours of induction, with minimal yield at 7 hours and no visible yield in the overnight group. However, at 30° C. the scFv-His yield was high at all induction durations. Purification of CDA-His from BL21 DE3 yielded high protein at both 30° C. and 37° C. at all induction durations in BL21 DE3. The purity of samples was low. Unique bands for scFv-CDA-His were not observed. In T7 Shuffle, the purification yielded visible scFv-His production with overnight induction and minimal scFv-His with 4 hours of induction. Purification of samples was low. Unique bands were not observed for scFv-CDA-His.

[0325] The purity of samples was also analyzed with densitometry on the SDS PAGE gels (FIGS. 17A-17D). Densitometry analysis showed a wide range of purity with the samples ranging from about 5-85%. The amount of protein of interest can be calculated by percent purity multiplied by total protein concentration in the sample measured by Qubit. Concentration of protein of interest shows a high range as well, with the highest yield at about 450 ug/mL and lowest at 4 ug/mL (FIGS. 18A-18B).

[0326] Recombinant protein production was also validated by using Western blot for 6×Histine (FIGS. 19A-19E). Both scFv and CDA were produced in BL21 DE3 and T7 Shuffle, though with different yields at different temperatures and induction times. scFv-CDA showed either none or minimal production in both BL21 and T7 Shuffle strains.

### Example 6

[0327] Samples that showed a signal in Western blot and densitometry analysis in Example 5 were assayed for CDA activity and CD117 binding. First, CDA activity was measured by using the indopheol method (FIGS. 20A-20B). The recombinantly produced and purified CDA-His in BL21 DE3 were active. The activity value was approximately half of commercially available human CDA from Abcam®. 1 Unit was the release of 1 μmol ammonia per minute at 37° C., and specific enzyme activity was defined as units of enzyme per mg of enzyme. Next, indirect CD117 ELISA was used to validate the binding of recombinantly produced scFv-His and scFv-CDA-His (FIG. 21). The recombinantly produced and purified scFv-His in BL21 DE3 showed binding to its target CD117 only when produced at 30° C. scFv-CDA-His fusion protein showed binding to CD117 when produced in BL21 DE3 with the given conditions. The scFv-His produced in T7 Shuffle showed binding when induced overnight but not when induced at 4 hours. The signals obtained from alkaline phosphate (shows absorbance at 405 nm) were not normalized to amount of protein; therefore, the intensity of signals were not correlated to binding affinity in FIG. 21.

### Example 7

[0328] For every heavy chain and light chain antibody pair, the following protein sequences and their corresponding DNA sequences are created:
[0329] 1. Light chain variable region of antibody+ (G4S)3 linker+Heavy chain variable region of antibody+Glycine serine linker with variable length (11 possibilities)+CDA+6×His
[0330] 2. Heavy chain variable region of antibody+ (G4S)3 linker+Light chain variable region of antibody+Glycine serine linker with variable length (11 possibilities)+CDA+6×His
[0331] 3. CDA+Glycine serine linker with variable length (11 possibilities)+Heavy chain variable region of antibody+ (G4S)3 linker+Light chain variable region of antibody+6×His
[0332] 4. CDA+Glycine serine linker with variable length (11 possibilities)+Light chain variable region of antibody+ (G4S)3 linker+Heavy chain variable region of antibody+6×His
[0333] 5. Light chain variable region of antibody+ (G4S)3 linker+Heavy chain variable region of antibody+Glycine serine linker with variable length (11 possibilities)+CDA
[0334] 6. Heavy chain variable region of antibody+ (G4S)3 linker+Light chain variable region of antibody+Glycine serine linker with variable length (11 possibilities)+CDA
[0335] 7. CDA+Glycine serine linker with variable length (11 possibilities)+Heavy chain variable region of antibody+ (G4S)3 linker+Light chain variable region of antibody
[0336] 8. CDA+Glycine serine linker with variable length (11 possibilities)+Light chain variable region of antibody+ (G4S)3 linker+Heavy chain variable region of antibody

[0337] In the above, the sequences 5-8 correspond to sequences 1˜4 where the His tag has been removed with a protease e.g. bovine carboxy peptidase A.

[0338] It should be noted that even though the peptide sequences will remain the same, the DNA sequences can vary slightly based on codon optimization for E. coli.

[0339] The CDA gene sequence can be obtained with the National Library of Medicine accession number P32320. The antibody sequences were obtained from International Publication No. WO 2020/219775 A1.

[0340] All sequences were expressed in a pET28a(+) plasmid following the ribosome binding site, however, they can be expressed in any plasmid with a T7 promoter and is compatible with expression in BL21 DE3 and T7 Shuffle strains of E. coli.

TABLE 1

| Naming in | | | |
|---|---|---|---|
| Sequence_ | | | |
| Name | Description | Peptide_sequence | DNA sequence |
| Ab58_LC | Ab58_light_chain_ | DIQMTQSPSSVSASVGDRVTITCR | GACATCCAGATGACCCAGTCTCCATCTTCCGTGTCTGCATCTGT |
| | variable_region | ASQGISSWLAWYQQKPGKAPKLL | AGGAGACAGAGTCACCATCACTTGTCGGGCGAGTCAGGGTAT |
| | | IIYAASSLQSGVPSRFSGSGSGTD | TAGCAGCTGGTTAGCCTGGTATCAGCAGAAACCAGGGAAAGC |
| | | FTLTISSLQPEDFATYYCQQTNSF | CCCTAAGCTCCTGATCTATGCTGCATCCAGTTTGCAAAGTGGG |
| | | PYTFGGGTKVEIK (SEQ ID NO: 441) | GTCCCATCAAGGTTCAGCGGCAGTGGATCTGGGACAGATTTCA |
| | | | CTCTCACCATCAGCAGCCTGCAGCCTGAAGATTTTGCAACTTA |
| | | | TTACTGTCAGCAAACAAATAGTTTCCCTTACACTTTTGGCGGA |
| | | | GGGACCAAGGTTGAGATCAAA (SEQ ID NO: 451) |
| Ab58_HC | Ab58_heavy_chain_ | EVQLLESGGGLVQPGGSLRLSCA | GAGGTGCAGCTGTTGGAGTCTGGGGGAGGCTTGGTACAGCCT |
| | variable_region | ASGETFSNYAMSWVRQAPGKGLE | GGGGGGTCCCTGAGACTCTCCTGTGCAGCCTCTGGATTCACCT |
| | | WVSAISGSGGSTYYADSVKGRFTI | TTAGCAATTATGCCATGAGCTGGGTCCGCCAGGCTCCAGGGAA |
| | | SRDNSKNTLYLQMNSLRAEDTAV | GGGGCTGGAGTGGGTCTCAGCTATTAGTGGTAGTGGTGGTAGC |
| | | YYCAKGPPTYHTNYYYMDVWGK | ACATACTACGCAGACTCCGTGAAGGGCCGGTTCACCATCTCCA |
| | | GTTVTVSS (SEQ ID NO: 442) | GAGACAATTCCAAGAACACGCTGTATCTGCAAATGAACAGCC |
| | | | TGAGAGCCGAGGACACGGCGGTGTACTACTGCGCCAAGGGCC |
| | | | CTCCTACATACCACACAAACTACTACTACATGGACGTATGGGG |
| | | | CAAGGGTACAACTGTCACCGTCTCCTCA (SEQ ID NO: 452) |
| Ab61_LC | Ab61_light_chain_ | DIQMTQSPSSVSASVGDRVTITCR | GACATCCAGATGACCCAGTCTCCATCTTCCGTGTCTGCATCTGT |
| | variable_region | ASQGISSWLAWYQQKPGKAPKLL | AGGAGACAGAGTCACCATCACTTGTCGGGCGAGTCAGGGTAT |
| | | IYAASSLQQSGVPSRFSGSGSGTD | TAGCAGCTGGTTAGCCTGGTATCAGCAGAAACCAGGGAAAGC |
| | | FTLTISSLQPEDFATYYCQQTNSE | CCCTAAGCTCCTGATCTATGCTGCATCCAGTTTGCAAAGTGGG |
| | | PYTFGGGTKVEIK (SEQ ID NO: 443) | GTCCCATCAAGGTTCAGCGGCAGTGGATCTGGGACAGATTTCA |
| | | | CTCTCACCATCAGCAGCCTGCAGCCTGAAGATTTTGCAACTTA |
| | | | TTACTGTCAGCAAACAAATAGTTTCCCTTACACTTTTGGCGGA |
| | | | GGGACCAAGGTTGAGATCAAA (SEQ ID NO: 453) |
| Ab61_HC | Ab61_heavy_chain_ | EVQLLESGGGLVQPGGSLRLSCA | GAGGTGCAGCTGTTGGAGTCTGGGGGAGGCTTGGTACAGCCT |
| | variable_region | ASGETESSYVMIWVRQAPGKGLEWV | GGGGGGTCCCTGAGACTCTCCTGTGCAGCCTCTGGATTCACCT |
| | | SSISGDSVTTYYADSVKGRFTISRDNS | TTAGCAGCTATGTCATGATCTGGGTCCGCCAGGCTCCAGGGAA |
| | | KNTLYLQMNSLRAEDTAVYYCAKGP | GGGGCTGGAGTGGGTCTCAAGCATTAGTGGTGACAGCGTAAC |
| | | PTYHTNYYYMDVWGKGTTVTVSS | AACATACTACGCAGACTCCGTGAAGGGCCGGTTCACCATCTCC |
| | | (SEQ ID NO: 444) | AGAGACAATTCCAAGAACACGCTGTATCTGCAAATGAACAGC |
| | | | CTGAGAGCCGAGGACACGGCGGTGTACTACTGCGCCAAGGGC |
| | | | CCTCCTACATACCACACAAACTACTACTACATGGACGTATGGG |
| | | | GCAAGGGTACAACTGTCACCGTCTCCTCA (SEQ ID NO: 454) |
| Ab66_LC | Ab66_light_chain_ | DIQMTQSPSSLSASVGDRVTITCRASQ | GACATCCAGATGACCCAGTCTCCATCCTCCCTGTCTGCATCTGT |
| | variable_region | SISSYLNWYQQKPGKAPKLLIYAASSL | AGGAGACAGAGTCACCATCACTTGCCGGGCAAGTCAGAGCAT |
| | | QSGVPSRFSGSGSGTDFTLTISSLQPED | TAGCAGCTATTTAAATTGGTATCAGCAGAAACCAGGGAAAGC |
| | | FATYYCQQSYIAPYTFGGGTKVEIK | CCCTAAGCTCCTGATCTATGCTGCATCCAGTTTGCAAAGTGGG |
| | | (SEQ ID NO: 445) | GTCCCATCAAGGTTCAGTGGCAGTGGATCTGGGACAGATTTCA |
| | | | CTCTCACCATCAGCAGTCTGCAACCTGAAGATTTTGCAACTTA |
| | | | CTACTGTCAGCAAAGCTACATCGCCCCTTACACTTTTGGCGGA |
| | | | GGGACCAAGGTTGAGATCAAA (SEQ ID NO: 455) |
| Ab66_HC | Ab66_heavy_chain_ | EVQLVESGGGLVQPGGSLRLSCA | GAGGTGCAGCTGGTGGAGTCTGGGGGAGGCTTGGTCCAGCCT |
| | variable_region | ASGETFSDHYMDWVRQAPGKGLASG | GGAGGGTCCCTGAGACTCTCCTGTGCAGCCTCTGGATTCACCT |
| | | ETFSDHYMDWVRQAPGKGLEWVGRI | TCAGTGACCACTACATGGACTGGGTCCGCCAGGCTCCAGGGA |
| | | RNKASSYTTEYAASVKGRFTISRDDS | AGGGGCTGGAGTGGGTTGGCCGTACTAGAAACAAAGCTAGTA |
| | | KNSLYLQMNSLKTEDTAVYYCAREP | GTTACACCACAGAATACGCCGCGTCTGTGAAAGGCAGATTCAC |
| | | KYWIDFDLWGRGTLVTVSS (SEQ ID | CATCTCAAGAGATGATTCAAAGAACTCACTGTATCTGCAAATG |
| | | NO: 446) | AACAGCCTGAAAACCGAGGACACGGCGGTGTACTACTGCGCC |
| | | | AGAGAGCCTAAATACTGGATCGACTTCGACCTATGGGGGAGA |
| | | | GGTACCTTGGTCACCGTCTCCTCA (SEQ ID NO: 456) |
| Ab68_LC | Ab68_light_chain_ | DIQMTQSPSSLSASVGDRVTITCRASQ | GACATCCAGATGACCCAGTCTCCATCCTCCCTGTCTGCATCTGT |
| | variable_region | SISSYLNWYQQKPGKAPKLLIYAASSL | AGGAGACAGAGTCACCATCACTTGCCGGGCAAGTCAGAGCAT |
| | | QSGVPSRFSGSGSGTDFTLTISSLQPED | TAGCAGCTATTTAAATTGGTATCAGCAGAAACCAGGGAAAGC |
| | | FATYYCQQSYIAPYTFGGGTKVEIK | CCCTAAGCTCCTGATCTATGCTGCATCCAGTTTGCAAAGTGGG |
| | | (SEQ ID NO: 447) | GTCCCATCAAGGTTCAGTGGCAGTGGATCTGGGACAGATTTCA |
| | | | CTCTCACCATCAGCAGTCTGCAACCTGAAGATTTTGCAACTTA |
| | | | CTACTGTCAGCAAAGCTACATCGCCCCTTACACTTTTGGCGGA |
| | | | GGGACCAAGGTTGAGATCAAA (SEQ ID NO: 457) |
| Ab68_HC | Ab68_heavy_chain_ | EVQLVESGGGLVQPGRSLRLSCTASG | GAGGTGCAGCTGGTGGAGTCTGGGGGAGGCTTGGTACAGCCA |
| | variable_region | FTFSDHDMNWVRQAPGKGLEWVGR | GGGCGGTCCCTGAGACTCTCCTGTACAGCTTCTGGATTCACCT |
| | | TRNAAGSYTTEYAASVKGRFTISRDD | TCAGTGACCACGACATGAACTGGGTCCGCCAGGCTCCAGGGA |
| | | SKNSLYLQMNSLKTEDTAVYYCARE | AGGGGCTGGAGTGGGTTGGCCGTACTAGAAACGCCGCTGGAA |
| | | PKYWIDFDLWGRGTLVTSS (SEQ ID | GTTACACCACAGAATACGCCGCGTCTGTGAAAGGCAGATTCAC |
| | | NO: 448) | CATCTCAAGAGATGATTCAAAGAACTCACTGTATCTGCAAATG |
| | | | AACAGCCTGAAAACCGAGGACACGGCGGTGTACTACTGCGCC |
| | | | AGAGAGCCTAAATACTGGATCGACTTCGACCTATGGGGG (SEQ |
| | | | ID NO: 458) |
| Ab69 HC | Ab69_heavy_chain_ | EVQLVESGGGLVQPGGSLRLSCA | GAGGTGCAGCTGGTGGAGTCTGGGGGAGGCTTGGTCCAGCCT |
| | variable_region | ASGETFVDHDMDWVRQAPGKGLEW | GGAGGGTCCCTGAGACTCTCCTGTGCAGCCTCTGGATTCACCT |
| | | VGRTRNKLGSYTTEYAASVKGRET | TCGTAGACCACGACATGGACTGGGTCCGCCAGGCTCCAGGGA |
| | | GRDDSKNSLYLQMNSLKTEDTAVYY | AGGGGCTGGAGTGGGTTGGCCGTACTAGAAACAAACTAGGAA |
| | | CAREPKYWIDFDLWGRGTLVTVSS | GTTACACCACAGAATACGCCGCGTCTGTGAAAGGCAGATTCAC |
| | | (SEQ ID NO: 449) | CATCTCAAGAGATGATTCAAAGAACTCACTGTATCTGCAAATG |
| | | | AACAGCCTGAAAACCGAGGACACGGCGGTGTACTACTGCGCC |
| | | | AGAGAGCCTAAATACTGGATCGACTTCGACCTATGGGGGAGA |
| | | | GGTACCTTGGTCACCGTCTCCTCA (SEQ ID NO: 459) |
| Ab69_LC | Ab69_light_chain_ | DIQMTQSPSSLSASVGDRVTITCR | GACATCCAGATGACCCAGTCTCCATCCTCCCTGTCTGCATCTGT |
| | variable_region | ASQSISSYLNWYQQKPGKAPKLLIYA | AGGAGACAGAGTCACCATCACTTGCCGGGCAAGTCAGAGCAT |
| | | ASSLQSGVPSRFSGSGSGTDFTLTISSL | TAGCAGCTATTTAAATTGGTATCAGCAGAAACCAGGGAAAGC |
| | | QPEDFATYYCQQSYIAPYIFGGGTKV | CCCTAAGCTCCTGATCTATGCTGCATCCAGTTTGCAAAGTGGG |
| | | EIK (SEQ ID NO: 450) | GTCCCATCAAGGTTCAGTGGCAGTGGATGCGGTACAGATTTCA |
| | | | CTCTCACCATCAGCAGTCTGCAACCTGAAGATTTTGCAACTTA |
| | | | CTACTGTCAGCAAAGCTACATCGCCCCTTACACTTTTGGCGGA |
| | | | GGGACCAAGGTTGAGATCAAA (SEQ ID NO: 460) |

TABLE 2
List of potential linkers betweeen the scFv and CDA

| Naming in | | | |
|---|---|---|---|
| Sequence_ | | | |
| Name | Description | Peptide_sequence | DNA sequence |
| G4S linker | G4S linker | GGGGS (SEQ ID NO: 461) | ggtggcgggggatca (SEQ ID NO: 472) |
| (G4S)3 | (G4S)3 linker | GGGGSGGGGSGGGGS (SEQ ID NO: | ggagggggcggatcaggcggaggtggatcgggagggggtggtagc (SEQ ID NO: 473) |
| linker | | 462) | |
| (G4S)4 | (G4S)4 linker | GGGGSGGGGSGGGGSGGGGS (SEQ | ggtggaggcggttcgggtggagggggatctggtggcggaggtagcggtggcgggggatca (SEQ |
| linker | | ID NO: 463) | ID NO: 474) |
| (G4S)5 | (G4S)5 linker | GGGGSGGGGSGGGGSGGGGSGGGGS | ggtggaggcggttcgggtggagggggatctggtggcggaggtagcggtggcgggggatcaggtgg |
| linker | | (SEQ ID NO: 464) | cgggggatca (SEQ ID NO: 475) |
| (G4S)6 | (G4S)6 linker | GGGGSGGGGSGGGGSGGGGSGGGGS | ggtggaggcggttcgggtggagggggatctggtggcggaggtagcggtggcgggggatcaggtgg |
| linker | | GGGGS (SEQ ID NO: 465) | cgggggatcaggtggcgggggatca (SEQ ID NO: 476) |
| (G4S)7 | (G4S)7 linker | GGGGSGGGGSGGGGSGGGGSGGGGS | ggtggaggcggttcgggtggagggggatctggtggcggaggtagcggtggcgggggatcaggtgg |
| linker | | GGGGSGGGGS (SEQ ID NO: 466) | cgggggatcaggtggcgggggatcaggtggcgggggatca (SEQ ID NO: 477) |
| (G4S)8 | (G4S)8 linker | GGGGSGGGGSGGGGSGGGGSGGGGS | ggtggaggcggttcgggtggagggggatctggtggcggaggtagcggtggcgggggatcaggtgg |
| linker | | GGGGSGGGGSGGGGS (SEQ ID NO: | cgggggatcaggtggcgggggatcaggtggcgggggatcaggtggcgggggatca (SEQ ID |
| | | 467) | NO: 478) |
| (G4S)9 | (G4S)9 linker | GGGGSGGGGSGGGGSGGGGSGGGGS | ggtggaggcggttcgggtggagggggatctggtggcggaggtagcggtggcgggggatcaggtgg |
| linker | | GGGGSGGGGSGGGGSGGGGS (SEQ | cgggggatcaggtggcgggggatcaggtggcgggggatcaggtggcgggggatcaggtggcggg |
| | | ID NO: 468) | ggatca (SEQ ID NO: 479) |
| (G4S)10 | (G4S)10 linker | GGGGSGGGGSGGGGSGGGGSGGGGS | ggtggaggcggttcgggtggagggggatctggtggcggaggtagcggtggcgggggatcaggtgg |
| linker | | GGGGSGGGGSGGGGSGGGGSGGGGS | cgggggatcaggtggcgggggatcaggtggcgggggatcaggtggcgggggatcaggtggcggg |
| | | (SEQ ID NO: 469) | ggatcaggtggcgggggatca (SEQ ID NO: 480) |
| (G4S)11 | (G4S)11 linker | GGGGSGGGGSGGGGSGGGGSGGGGS | ggtggaggcggttcgggtggagggggatctggtggcggaggtagcggtggcgggggatcaggtgg |
| linker | | GGGGSGGGGSGGGGSGGGGSGGGGS | cgggggatcaggtggcgggggatcaggtggcgggggatcaggtggcgggggatcaggtggcggg |
| | | GGGGS (SEQ ID NO: 470) | ggatcaggtggcgggggatcaggtggcgggggatca (SEQ ID NO: 481) |
| (G4S)112 | (G4S)112 linker | GGGGSGGGGSGGGGSGGGGSGGGGS | ggtggaggcggttcgggtggagggggatctggtggcggaggtagcggtggcgggggatcaggtgg |
| linker | | GGGGSGGGGSGGGGSGGGGSGGGGS | gggggatcaggtggcgggggatcaggtggcgggggatcaggtggcgggggatcaggtggcggg |
| | | GGGGSGGGGS (SEQ ID NO: 471) | ggatcaggtggcgggggatcaggtggcgggggatcaggtggcgggggatca (SEQ ID NO: |
| | | | 482) |

TABLE 3
Human CDA sequence

| Naming | | |
|---|---|---|
| in | | |
| Sequence_ | | |
| Name | Peptide_sequence | DNA sequence |
| CDA | MAQKRPACTLKPECVQQLLV | cccgctgctctgctgcctgcccggggtaccaacatggcccagaagcgtcctgcct |
| | CSQEAKKSAYCPYSHFPVGA | gcaccctgaagcctgagtgtgtccagcagctgctggtttgctcccaggaggccaa |
| | ALLTQEGRIFKGCNIENACYP | gaagtcagcctactgcccctacagtcactttcctgtgggggctgccctgctcaccc |
| | LGICAERTAIQKAVSEGYKDF | aggaggggagaatcttcaaagggtgcaacatagaaaatgcctgctacccgctgg |
| | RAIAIASDMQDDFISPCGACR | gcatctgtgctgaacggaccgctatccagaaggccgtctcagaagggtacaagg |
| | QVMREFGTNWPVYMTKPDG | atttcagggcaattgctatcgccagtgacatgcaagatgattttatctctccatgtgg |
| | TYIVMTVQELLPSSFGPEDLQ | ggcctgcaggcaagtcatgagagagtttggcaccaactggcccgtgtacatgacc |
| | KTQ (SEQ ID NO: 483) | aagcoggatggtacgtatatt (SEQ ID NO: 484) |

TABLE 4
Purification His tag

| Naming in | | Peptide_ | |
|---|---|---|---|
| Sequence_Name | Description | sequence | DNA sequence |
| HIS | 6xHis | HHHHHH (SEQ ID NO: | caccatcatcatcaccat (SEQ ID NO: 486) |
| | | 485) | |

TABLE 5

| Sequence_ | |
|---|---|
| Name | Protein_Sequence |
| Ab58_LC_ | DIQMTQSPSSVSASVGDRVTITCRASQGISSWLAWYQQKPGKAPKLLLIYAASSLQ |
| (G4S)3_HC_G4S | SGVPSRFSGSGSGTDFTLTISSLQPEDFATYYCQQTNSFPYTFGGGTKVEIKGGGGS |
| linker_CDA_ | GGGGSGGGGSEVQLLESGGGLVQPGGSLRLSCAASGETFSNYAMSWVRQAPGKG |
| HIS | LEWVSAISGSGGSTYYADSVKGRFTISRDNSKNTLYLQMNSLRAEDTAVYYCAKG |
| | PPTYHTNYYYMDVWGKGTTVTVSSGGGGSMAQKRPACTLKPECVQQLLVCSQEA |
| | KKSAYCPYSHFPVGAALLTQEGRIFKGCNIENACYPLGICAERTAIQKAVSEGYKDF |
| | RAIAIASDMQDDFISPCGACRQVMREFGTNWPVYMTKPDGTYIVMTVQELLPSSFG |
| | PEDLQKTQHHHHHH (SEQ ID NO: 1) |
| Ab58_LC_ | DIQMTQSPSSVSASVGDRVTITCRASQGISSWLAWYQQKPGKAPKLLLIYAASSLQ |
| (G4S)3_HC_ | SGVPSRFSGSGSGTDFTLTISSLQPEDFATYYCQQTNSFPYTFGGGTKVEIKGGGGS |
| (G4S)3 | GGGGSGGGGSEVQLLESGGGLVQPGGSLRLSCAASGETFSNYAMSWVRQAPGKG |
| linker_CDA_ | LEWVSAISGSGGSTYYADSVKGRFTISRDNSKNTLYLQMNSLRAEDTAVYYCAKG |
| HIS | PPTYHTNYYYMDVWGKGTTVTVSSGGGGSGGGGSGGGGSMAQKRPACTLKPEC |
| | VQQLLVCSQEAKKSAYCPYSHFPVGAALLTQEGRIFKGCNIENACYPLGICAERTAI |
| | QKAVSEGYKDFRAIAIASDMQDDFISPCGACRQVMREFGTNWPVYMTKPDGTYIV |
| | MTVQELLPSSFGPEDLQKTQHHHHHH (SEQ ID NO: 2) |
| Ab58_LC_ | DIQMTQSPSSVSASVGDRVTITCRASQGISSWLAWYQQKPGKAPKLLLIYAASSLQ |
| (G4S)3_HC_ | SGVPSRFSGSGSGTDFTLTISSLQPEDFATYYCQQTNSFPYTFGGGTKVEIKGGGGS |
| (G4S)4 | GGGGSGGGGSEVQLLESGGGLVQPGGSLRLSCAASGETFSNYAMSWVRQAPGKG |
| linker_CDA_ | LEWVSAISGSGGSTYYADSVKGRFTISRDNSKNTLYLQMNSLRAEDTAVYYCAKG |
| HIS | PPTYHTNYYYMDVWGKGTTVTVSSGGGGSGGGGSGGGGSGGGGSMAQKRPACT |
| | LKPECVQQLLVCSQEAKKSAYCPYSHFPVGAALLTQEGRIFKGCNIENACYPLGIC |
| | AERTAIQKAVSEGYKDFRAIAIASDMQDDFISPCGACRQVMREFGTNWPVYMTKP |
| | DGTYIVMTVQELLPSSFGPEDLQKTQHHHHHH (SEQ ID NO: 3) |
| Ab58_LC_ | DIQMTQSPSSVSASVGDRVTITCRASQGISSWLAWYQQKPGKAPKLLLIYAASSLQ |
| (G4S)3_HC_ | SGVPSRFSGSGSGTDFTLTISSLQPEDFATYYCQQTNSFPYTFGGGTKVEIKGGGGS |
| (G4S)5 | GGGGSGGGGSEVQLLESGGGLVQPGGSLRLSCAASGETFSNYAMSWVRQAPGKG |
| linker_CDA_ | LEWVSAISGSGGSTYYADSVKGRFTISRDNSKNTLYLQMNSLRAEDTAVYYCAKG |
| HIS | PPTYHTNYYYMDVWGKGTTVTVSSGGGGSGGGGSGGGGSGGGGSGGGGSMAQK |
| | RPACTLKPECVQQLLVCSQEAKKSAYCPYSHFPVGAALLTQEGRIFKGCNIENACY |
| | PLGICAERTAIQKAVSEGYKDFRAIAIASDMQDDFISPCGACRQVMREFGTNWPVY |
| | MTKPDGTYIVMTVQELLPSSFGPEDLQKTQHHHHHH (SEQ ID NO: 4) |
| Ab58_LC_ | DIQMTQSPSSVSASVGDRVTITCRASQGISSWLAWYQQKPGKAPKLLLIYAASSLQ |
| (G4S)3_HC_ | SGVPSRFSGSGSGTDFTLTISSLQPEDFATYYCQQTNSFPYTFGGGTKVEIKGGGGS |
| (G4S)6 | GGGGSGGGGSEVQLLESGGGLVQPGGSLRLSCAASGETFSNYAMSWVRQAPGKG |
| linker_CDA_ | LEWVSAISGSGGSTYYADSVKGRFTISRDNSKNTLYLQMNSLRAEDTAVYYCAKG |
| HIS | PPTYHTNYYYMDVWGKGTTVTVSSGGGGSGGGGSGGGGSGGGGSGGGGSGGGG |
| | SMAQKRPACTLKPECVQQLLVCSQEAKKSAYCPYSHFPVGAALLTQEGRIFKGCNI |
| | ENACYPLGICAERTAIQKAVSEGYKDFRAIAIASDMQDDFISPCGACRQVMREFGT |
| | NWPVYMTKPDGTYIVMTVQELLPSSFGPEDLQKTQHHHHHH (SEQ ID NO: 5) |
| Ab58_LC_ | DIQMTQSPSSVSASVGDRVTITCRASQGISSWLAWYQQKPGKAPKLLLIYAASSLQ |
| (G4S)3_HC_ | SGVPSRFSGSGSGTDFTLTISSLQPEDFATYYCQQTNSFPYTFGGGTKVEIKGGGGS |
| (G4S)7 | GGGGGGGGSEVQLLESGGGLVQPGGSLRLSCAASGETFSNYAMSWVRQAPGKG |
| linker_CDA_ | LEWVSAISGSGGSTYYADSVKGRFTISRDNSKNTLYLQMNSLRAEDTAVYYCAKG |
| HIS | PPTYHTNYYYMDVWGKGTTVTVSSGGGGSGGGGSGGGGSGGGGSGGGGSGGGG |
| | SGGGGSMAQKRPACTLKPECVQQLLVCSQEAKKSAYCPYSHFPVGAALLTQEGRI |
| | FKGCNIENACYPLGICAERTAIQKAVSEGYKDFRAIAIASDMQDDFISPCGACRQV |
| | MREFGTNWPVYMTKPDGTYIVMTVQELLPSSFGPEDLQKTQHHHHHH (SEQ ID |
| | NO: 6) |
| Ab58_LC_ | DIQMTQSPSSVSASVGDRVTITCRASQGISSWLAWYQQKPGKAPKLLLIYAASSLQ |
| (G4S)3_HC_ | SGVPSRFSGSGSGTDFTLTISSLQPEDFATYYCQQTNSFPYTFGGGTKVEIKGGGGS |
| (G4S)8 | GGGGSGGGGSEVQLLESGGGLVQPGGSLRLSCAASGETFSNYAMSWVRQAPGKG |
| linker_CDA_ | LEWVSAISGSGGSTYYADSVKGRFTISRDNSKNTLYLQMNSLRAEDTAVYYCAKG |
| HIS | PPTYHTNYYYMDVWGKGTTVTVSSGGGGSGGGGSGGGGSGGGGSGGGGSGGGG |
| | SGGGGSGGGGSMAQKRPACTLKPECVQQLLVCSQEAKKSAYCPYSHFPVGAALLT |
| | QEGRIFKGCNIENACYPLGICAERTAIQKAVSEGYKDFRAIAIASDMQDDFISPCGA |
| | CRQVMREFGTNWPVYMTKPDGTYIVMTVQELLPSSFGPEDLQKTQHHHHHH |
| | (SEQ ID NO: 7) |
| Ab58_LC_ | DIQMTQSPSSVSASVGDRVTITCRASQGISSWLAWYQQKPGKAPKLLLIYAASSLQ |
| (G4S)3_HC_ | SGVPSRFSGSGSGTDFTLTISSLQPEDFATYYCQQTNSFPYTFGGGTKVEIKGGGGS |
| (G4S)9 | GGGGSGGGGSEVQLLESGGGLVQPGGSLRLSCAASGETFSNYAMSWVRQAPGKG |
| linker_CDA_ | LEWVSAISGSGGSTYYADSVKGRFTISRDNSKNTLYLQMNSLRAEDTAVYYCAKG |
| HIS | PPTYHTNYYYMDVWGKGTTVTVSSGGGGSGGGGSGGGGSGGGGSGGGGSGGGG |
| | SGGGGSGGGGSGGGGSMAQKRPACTLKPECVQQLLVCSQEAKKSAYCPYSHFPV |
| | GAALLTQEGRIFKGCNIENACYPLGICAERTAIQKAVSEGYKDFRAIAIASDMQDDF |
| | ISPCGACRQVMREFGTNWPVYMTKPDGTYIVMTVQELLPSSFGPEDLQKTQHHHH |
| | HH (SEQ ID NO: 8) |
| Ab58_LC_ | DIQMTQSPSSVSASVGDRVTITCRASQGISSWLAWYQQKPGKAPKLLLIYAASSLQ |
| (G4S)3_HC_ | SGVPSRFSGSGSGTDFTLTISSLQPEDFATYYCQQTNSFPYTFGGGTKVEIKGGGGS |
| (G4S)10 | GGGGSGGGGSEVQLLESGGGLVQPGGSLRLSCAASGETFSNYAMSWVRQAPGKG |
| linker_CDA_ | LEWVSAISGSGGSTYYADSVKGRFTISRDNSKNTLYLQMNSLRAEDTAVYYCAKG |
| HIS | PPTYHTNYYYMDVWGKGTTVTVSSGGGGSGGGGSGGGGSGGGGSGGGGSGGGG |
| | SGGGGSGGGGSGGGGSGGGGSMAQKRPACTLKPECVQQLLVCSQEAKKSAYCPY |
| | SHFPVGAALLTQEGRIFKGCNIENACYPLGICAERTAIQKAVSEGYKDFRAIAIASD |
| | MQDDFISPCGACRQVMREFGTNWPVYMTKPDGTYIVMTVQELLPSSFGPEDLQKT |
| | QHHHHHH (SEQ ID NO: 9) |
| Ab58_LC_ | DIQMTQSPSSVSASVGDRVTITCRASQGISSWLAWYQQKPGKAPKLLLIYAASSLQ |
| (G4S)3_HC_ | SGVPSRFSGSGSGTDFTLTISSLQPEDFATYYCQQTNSFPYTFGGGTKVEIKGGGGS |
| (G4S)11 | GGGGSGGGGSEVQLLESGGGLVQPGGSLRLSCAASGETFSNYAMSWVRQAPGKG |
| linker_CDA_ | LEWVSAISGSGGSTYYADSVKGRFTISRDNSKNTLYLQMNSLRAEDTAVYYCAKG |
| HIS | PPTYHTNYYYMDVWGKGTTVTVSSGGGGSGGGGSGGGGSGGGGSGGGGSGGGG |
| | SGGGGSGGGGSGGGGSGGGGSGGGGSMAQKRPACTLKPECVQQLLVCSQEAKKS |
| | AYCPYSHFPVGAALLTQEGRIFKGCNIENACYPLGICAERTAIQKAVSEGYKDFRAI |
| | AIASDMQDDFISPCGACRQVMREFGTNWPVYMTKPDGTYIVMTVQELLPSSFGPE |
| | DLQKTQHHHHHH (SEQ ID NO: 10) |
| Ab58_LC_ | DIQMTQSPSSVSASVGDRVTITCRASQGISSWLAWYQQKPGKAPKLLLIYAASSLQ |
| (G4S)3_HC_ | SGVPSRFSGSGSGTDFTLTISSLQPEDFATYYCQQTNSFPYTFGGGTKVEIKGGGGS |
| (G4S)112 | GGGGSGGGGSEVQLLESGGGLVQPGGSLRLSCAASGETFSNYAMSWVRQAPGKG |
| linker_CDA_ | LEWVSAISGSGGSTYYADSVKGRFTISRDNSKNTLYLQMNSLRAEDTAVYYCAKG |
| HIS | PPTYHTNYYYMDVWGKGTTVTVSSGGGGSGGGGSGGGGSGGGGSGGGGSGGGG |
| | SGGGGSGGGGSGGGGSGGGGSGGGGSGGGGSMAQKRPACTLKPECVQQLLVCSQ |
| | EAKKSAYCPYSHFPVGAALLTQEGRIFKGCNIENACYPLGICAERTAIQKAVSEGY |
| | KDFRAIAIASDMQDDFISPCGACRQVMREFGTNWPVYMTKPDGTYIVMTVQELLP |
| | SSFGPEDLQKTQHHHHHH (SEQ ID NO: 11) |
| Ab61_LC_ | DIQMTQSPSSVSASVGDRVTITCRASQGISSWLAWYQQKPGKAPKLLIYAASSLQQ |
| (G4S)3_HC_G4S | SGVPSRFSGSGSGTDFTLTISSLQPEDFATYYCQQTNSEPYTFGGGTKVEIKGGGGS |
| linker_CDA_ | GGGGSGGGGSEVQLLESGGGLVQPGGSLRLSCAASGETESSYVMIWVRQAPGKGL |
| HIS | EWVSSISGDSVTTYYADSVKGRFTISRDNSKNTLYLQMNSLRAEDTAVYYCAKGP |
| | PTYHTNYYYMDVWGKGTTVTVSSGGGGSMAQKRPACTLKPECVQQLLVCSQEA |
| | KKSAYCPYSHFPVGAALLTQEGRIFKGCNIENACYPLGICAERTAIQKAVSEGYKDF |
| | RAIAIASDMQDDFISPCGACRQVMREFGTNWPVYMTKPDGTYIVMTVQELLPSSFG |
| | PEDLQKTQHHHHHH (SEQ ID NO: 12) |
| Ab61_LC_ | DIQMTQSPSSVSASVGDRVTITCRASQGISSWLAWYQQKPGKAPKLLIYAASSLQQ |
| (G4S)3_HC_ | SGVPSRFSGSGSGTDFTLTISSLQPEDFATYYCQQTNSEPYTFGGGTKVEIKGGGGS |
| (G4S)3 | GGGGGGGGSEVQLLESGGGLVQPGGSLRLSCAASGETESSYVMIWVRQAPGKGL |
| linker_CDA_ | EWVSSISGDSVTTYYADSVKGRFTISRDNSKNTLYLQMNSLRAEDTAVYYCAKGP |
| HIS | PTYHTNYYYMDVWGKGTTVTVSSGGGGSGGGGSGGGGSMAQKRPACTLKPECV |
| | QQLLVCSQEAKKSAYCPYSHFPVGAALLTQEGRIFKGCNIENACYPLGICAERTAIQ |
| | KAVSEGYKDFRAIAIASDMQDDFISPCGACRQVMREFGTNWPVYMTKPDGTYIVM |
| | TVQELLPSSFGPEDLQKTQHHHHHH (SEQ ID NO: 13) |
| Ab61_LC_ | DIQMTQSPSSVSASVGDRVTITCRASQGISSWLAWYQQKPGKAPKLLIYAASSLQQ |
| (G4S)3_HC_ | SGVPSRFSGSGSGTDFTLTISSLQPEDFATYYCQQTNSEPYTFGGGTKVEIKGGGGS |
| (G4S)4 | GGGGSGGGGSEVQLLESGGGLVQPGGSLRLSCAASGETESSYVMIWVRQAPGKGL |
| linker_CDA_ | EWVSSISGDSVTTYYADSVKGRFTISRDNSKNTLYLQMNSLRAEDTAVYYCAKGP |
| HIS | PTYHTNYYYMDVWGKGTTVTVSSGGGGSGGGGSGGGGSGGGGSMAQKRPACTL |
| | KPECVQQLLVCSQEAKKSAYCPYSHFPVGAALLTQEGRIFKGCNIENACYPLGICA |
| | ERTAIQKAVSEGYKDFRAIAIASDMQDDFISPCGACRQVMREFGTNWPVYMTKPD |
| | GTYIVMTVQELLPSSFGPEDLQKTQHHHHHH (SEQ ID NO: 14) |
| Ab61_LC_ | DIQMTQSPSSVSASVGDRVTITCRASQGISSWLAWYQQKPGKAPKLLIYAASSLQQ |
| (G4S)3_HC_ | SGVPSRFSGSGSGTDFTLTISSLQPEDFATYYCQQTNSEPYTFGGGTKVEIKGGGGS |
| (G4S)5 | GGGGSGGGGSEVQLLESGGGLVQPGGSLRLSCAASGETESSYVMIWVRQAPGKGL |
| linker_CDA_ | EWVSSISGDSVTTYYADSVKGRFTISRDNSKNTLYLQMNSLRAEDTAVYYCAKGP |
| HIS | PTYHTNYYYMDVWGKGTTVTVSSGGGGSGGGGSGGGGSGGGGSGGGGSMAQK |
| | RPACTLKPECVQQLLVCSQEAKKSAYCPYSHFPVGAALLTQEGRIFKGCNIENACY |
| | PLGICAERTAIQKAVSEGYKDFRAIAIASDMQDDFISPCGACRQVMREFGTNWPVY |
| | MTKPDGTYIVMTVQELLPSSFGPEDLQKTQHHHHHH (SEQ ID NO: 15) |
| Ab61_LC_ | DIQMTQSPSSVSASVGDRVTITCRASQGISSWLAWYQQKPGKAPKLLIYAASSLQQ |
| (G4S)3_HC_ | SGVPSRFSGSGSGTDFTLTISSLQPEDFATYYCQQTNSEPYTFGGGTKVEIKGGGGS |
| (G4S)6 | GGGGSGGGGSEVQLLESGGGLVQPGGSLRLSCAASGETESSYVMIWVRQAPGKGL |
| linker_CDA_ | EWVSSISGDSVTTYYADSVKGRFTISRDNSKNTLYLQMNSLRAEDTAVYYCAKGP |
| HIS | PTYHTNYYYMDVWGKGTTVTVSSGGGGSGGGGSGGGGSGGGGSGGGGSGGGGS |
| | MAQKRPACTLKPECVQQLLVCSQEAKKSAYCPYSHFPVGAALLTQEGRIFKGCNIE |
| | NACYPLGICAERTAIQKAVSEGYKDFRAIAIASDMQDDFISPCGACRQVMREFGTN |
| | WPVYMTKPDGTYIVMTVQELLPSSFGPEDLQKTQHHHHHH (SEQ ID NO: 16) |
| Ab61_LC_ | DIQMTQSPSSVSASVGDRVTITCRASQGISSWLAWYQQKPGKAPKLLIYAASSLQQ |
| (G4S)3_HC_ | SGVPSRFSGSGSGTDFTLTISSLQPEDFATYYCQQTNSEPYTFGGGTKVEIKGGGGS |
| (G4S)7 | GGGGSGGGGSEVQLLESGGGLVQPGGSLRLSCAASGETESSYVMIWVRQAPGKGL |
| linker_CDA_ | EWVSSISGDSVTTYYADSVKGRFTISRDNSKNTLYLQMNSLRAEDTAVYYCAKGP |
| HIS | PTYHTNYYYMDVWGKGTTVTVSSGGGGSGGGGSGGGGSGGGGSGGGGSGGGGS |
| | GGGGSMAQKRPACTLKPECVQQLLVCSQEAKKSAYCPYSHFPVGAALLTQEGRIF |
| | KGCNIENACYPLGICAERTAIQKAVSEGYKDFRAIAIASDMQDDFISPCGACRQVM |
| | REFGTNWPVYMTKPDGTYIVMTVQELLPSSFGPEDLQKTQHHHHHH (SEQ ID NO: |
| | 17) |
| Ab61_LC_ | DIQMTQSPSSVSASVGDRVTITCRASQGISSWLAWYQQKPGKAPKLLIYAASSLQQ |
| (G4S)3_HC_ | SGVPSRFSGSGSGTDFTLTISSLQPEDFATYYCQQTNSEPYTFGGGTKVEIKGGGGS |
| (G4S)8 | GGGGSGGGGSEVQLLESGGGLVQPGGSLRLSCAASGETESSYVMIWVRQAPGKGL |
| linker_CDA_ | EWVSSISGDSVTTYYADSVKGRFTISRDNSKNTLYLQMNSLRAEDTAVYYCAKGP |
| HIS | PTYHTNYYYMDVWGKGTTVTVSSGGGGSGGGGSGGGGSGGGGSGGGGSGGGGS |
| | GGGGSGGGGSMAQKRPACTLKPECVQQLLVCSQEAKKSAYCPYSHFPVGAALLT |
| | QEGRIFKGCNIENACYPLGICAERTAIQKAVSEGYKDFRAIAIASDMQDDFISPCGA |
| | CRQVMREFGTNWPVYMTKPDGTYIVMTVQELLPSSFGPEDLQKTQHHHHHH |
| | (SEQ ID NO: 18) |
| Ab61_LC_ | DIQMTQSPSSVSASVGDRVTITCRASQGISSWLAWYQQKPGKAPKLLIYAASSLQQ |
| (G4S)3_HC_ | SGVPSRFSGSGSGTDFTLTISSLQPEDFATYYCQQTNSEPYTFGGGTKVEIKGGGGS |
| (G4S)9 | GGGGSGGGGSEVQLLESGGGLVQPGGSLRLSCAASGETESSYVMIWVRQAPGKGL |
| linker_CDA_ | EWVSSISGDSVTTYYADSVKGRFTISRDNSKNTLYLQMNSLRAEDTAVYYCAKGP |
| HIS | PTYHTNYYYMDVWGKGTTVTVSSGGGGSGGGGSGGGGSGGGGSGGGGSGGGGS |
| | GGGGSGGGGSGGGGSMAQKRPACTLKPECVQQLLVCSQEAKKSAYCPYSHFPVG |
| | AALLTQEGRIFKGCNIENACYPLGICAERTAIQKAVSEGYKDFRAIAIASDMQDDFI |
| | SPCGACRQVMREFGTNWPVYMTKPDGTYIVMTVQELLPSSFGPEDLQKTQHHHH |
| | HH (SEQ ID NO: 19) |
| Ab61_LC_ | DIQMTQSPSSVSASVGDRVTITCRASQGISSWLAWYQQKPGKAPKLLIYAASSLQQ |
| (G4S)3_HC_ | SGVPSRFSGSGSGTDFTLTISSLQPEDFATYYCQQTNSEPYTFGGGTKVEIKGGGGS |
| (G4S)10 | GGGGSGGGGSEVQLLESGGGLVQPGGSLRLSCAASGETESSYVMIWVRQAPGKGL |
| linker_CDA_ | EWVSSISGDSVTTYYADSVKGRFTISRDNSKNTLYLQMNSLRAEDTAVYYCAKGP |
| HIS | PTYHTNYYYMDVWGKGTTVTVSSGGGGSGGGGSGGGGSGGGGSGGGGSGGGGS |
| | GGGGSGGGGSGGGGSGGGGSMAQKRPACTLKPECVQQLLVCSQEAKKSAYCPYS |
| | HFPVGAALLTQEGRIFKGCNIENACYPLGICAERTAIQKAVSEGYKDFRAIAIASDM |
| | QDDFISPCGACRQVMREFGTNWPVYMTKPDGTYIVMTVQELLPSSFGPEDLQKTQ |
| | HHHHHH (SEQ ID NO: 20) |
| Ab61_LC_ | DIQMTQSPSSVSASVGDRVTITCRASQGISSWLAWYQQKPGKAPKLLIYAASSLQQ |
| (G4S)3_HC_ | SGVPSRFSGSGSGTDFTLTISSLQPEDFATYYCQQTNSEPYTFGGGTKVEIKGGGGS |
| (G4S)11 | GGGGSGGGGSEVQLLESGGGLVQPGGSLRLSCAASGETESSYVMIWVRQAPGKGL |
| linker_CDA_ | EWVSSISGDSVTTYYADSVKGRFTISRDNSKNTLYLQMNSLRAEDTAVYYCAKGP |
| HIS | PTYHTNYYYMDVWGKGTTVTVSSGGGGSGGGGSGGGGSGGGGSGGGGSGGGGS |
| | GGGGSGGGGSGGGGSGGGGSGGGGSMAQKRPACTLKPECVQQLLVCSQEAKKSA |
| | YCPYSHFPVGAALLTQEGRIFKGCNIENACYPLGICAERTAIQKAVSEGYKDFRAIA |
| | IASDMQDDFISPCGACRQVMREFGTNWPVYMTKPDGTYIVMTVQELLPSSFGPED |
| | LQKTQHHHHHH (SEQ ID NO: 21) |
| Ab61_LC_ | DIQMTQSPSSVSASVGDRVTITCRASQGISSWLAWYQQKPGKAPKLLIYAASSLQQ |
| (G4S)3_HC_ | SGVPSRFSGSGSGTDFTLTISSLQPEDFATYYCQQTNSEPYTFGGGTKVEIKGGGGS |
| (G4S)112 | GGGGSGGGGSEVQLLESGGGLVQPGGSLRLSCAASGETESSYVMIWVRQAPGKGL |
| linker_CDA_ | EWVSSISGDSVTTYYADSVKGRFTISRDNSKNTLYLQMNSLRAEDTAVYYCAKGP |
| HIS | PTYHTNYYYMDVWGKGTTVTVSSGGGGSGGGGSGGGGSGGGGSGGGGSGGGGS |
| | GGGGSGGGGSGGGGSGGGGSGGGGSGGGGSMAQKRPACTLKPECVQQLLVCSQE |
| | AKKSAYCPYSHFPVGAALLTQEGRIFKGCNIENACYPLGICAERTAIQKAVSEGYK |
| | DFRAIAIASDMQDDFISPCGACRQVMREFGTNWPVYMTKPDGTYIVMTVQELLPSS |
| | FGPEDLQKTQHHHHHH (SEQ ID NO: 22) |
| Ab66_LC_ | DIQMTQSPSSLSASVGDRVTITCRASQSISSYLNWYQQKPGKAPKLLIYAASSLQSG |
| (G4S)3_HC_G4S | VPSRFSGSGSGTDFTLTISSLQPEDFATYYCQQSYIAPYTFGGGTKVEIKGGGGSGG |
| linker_CDA_ | GGSGGGGSEVQLVESGGGLVQPGGSLRLSCAASGETFSDHYMDWVRQAPGKGLA |
| HIS | SGETFSDHYMDWVRQAPGKGLEWVGRIRNKASSYTTEYAASVKGRFTISRDDSKN |
| | SLYLQMNSLKTEDTAVYYCAREPKYWIDFDLWGRGTLVTVSSGGGGSMAQKRPA |
| | CTLKPECVQQLLVCSQEAKKSAYCPYSHFPVGAALLTQEGRIFKGCNIENACYPLGI |
| | CAERTAIQKAVSEGYKDFRAIAIASDMQDDFISPCGACRQVMREFGTNWPVYMTK |
| | PDGTYIVMTVQELLPSSFGPEDLQKTQHHHHHH (SEQ ID NO: 23) |
| Ab66_LC_ | DIQMTQSPSSLSASVGDRVTITCRASQSISSYLNWYQQKPGKAPKLLIYAASSLQSG |
| (G4S)3_HC_ | VPSRFSGSGSGTDFTLTISSLQPEDFATYYCQQSYIAPYTFGGGTKVEIKGGGGSGG |
| (G4S)3 | GGSGGGGSEVQLVESGGGLVQPGGSLRLSCAASGETFSDHYMDWVRQAPGKGLA |
| linker_CDA_ | SGETFSDHYMDWVRQAPGKGLEWVGRIRNKASSYTTEYAASVKGRFTISRDDSKN |
| HIS | SLYLQMNSLKTEDTAVYYCAREPKYWIDFDLWGRGTLVTVSSGGGGSGGGGSGG |
| | GGSMAQKRPACTLKPECVQQLLVCSQEAKKSAYCPYSHFPVGAALLTQEGRIFKG |
| | CNIENACYPLGICAERTAIQKAVSEGYKDFRAIAIASDMQDDFISPCGACRQVMREF |
| | GTNWPVYMTKPDGTYIVMTVQELLPSSFGPEDLQKTQHHHHHH (SEQ ID NO: 24) |
| Ab66_LC_ | DIQMTQSPSSLSASVGDRVTITCRASQSISSYLNWYQQKPGKAPKLLIYAASSLQSG |
| (G4S)3_HC_ | VPSRFSGSGSGTDFTLTISSLQPEDFATYYCQQSYIAPYTFGGGTKVEIKGGGGSGG |
| (G4S)4 | GGSGGGGSEVQLVESGGGLVQPGGSLRLSCAASGETFSDHYMDWVRQAPGKGLA |
| linker_CDA_ | SGETFSDHYMDWVRQAPGKGLEWVGRIRNKASSYTTEYAASVKGRFTISRDDSKN |
| HIS | SLYLQMNSLKTEDTAVYYCAREPKYWIDFDLWGRGTLVTVSSGGGGSGGGGSGG |
| | GGSGGGGSMAQKRPACTLKPECVQQLLVCSQEAKKSAYCPYSHFPVGAALLTQE |
| | GRIFKGCNIENACYPLGICAERTAIQKAVSEGYKDFRAIAIASDMQDDFISPCGACR |
| | QVMREFGTNWPVYMTKPDGTYIVMTVQELLPSSFGPEDLQKTQHHHHHH (SEQ ID |
| | NO: 25) |
| Ab66_LC_ | DIQMTQSPSSLSASVGDRVTITCRASQSISSYLNWYQQKPGKAPKLLIYAASSLQSG |
| (G4S)3_HC_ | VPSRFSGSGSGTDFTLTISSLQPEDFATYYCQQSYIAPYTFGGGTKVEIKGGGGSGG |
| (G4S)5 | GGSGGGGSEVQLVESGGGLVQPGGSLRLSCAASGETFSDHYMDWVRQAPGKGLA |
| linker_CDA_ | SGETFSDHYMDWVRQAPGKGLEWVGRIRNKASSYTTEYAASVKGRFTISRDDSKN |
| HIS | SLYLQMNSLKTEDTAVYYCAREPKYWIDFDLWGRGTLVTVSSGGGGSGGGGSGG |
| | GGSGGGGSGGGGSMAQKRPACTLKPECVQQLLVCSQEAKKSAYCPYSHFPVGAA |
| | LLTQEGRIFKGCNIENACYPLGICAERTAIQKAVSEGYKDFRAIAIASDMQDDFISPC |
| | GACRQVMREFGTNWPVYMTKPDGTYIVMTVQELLPSSFGPEDLQKTQHHHHHH |
| | (SEQ ID NO: 26) |
| Ab66_LC_ | DIQMTQSPSSLSASVGDRVTITCRASQSISSYLNWYQQKPGKAPKLLIYAASSLQSG |
| (G4S)3_HC_ | VPSRFSGSGSGTDFTLTISSLQPEDFATYYCQQSYIAPYTFGGGTKVEIKGGGGSGG |
| (G4S)6 | GGSGGGGSEVQLVESGGGLVQPGGSLRLSCAASGETFSDHYMDWVRQAPGKGLA |
| linker_CDA_ | SGETFSDHYMDWVRQAPGKGLEWVGRIRNKASSYTTEYAASVKGRFTISRDDSKN |
| HIS | SLYLQMNSLKTEDTAVYYCAREPKYWIDFDLWGRGTLVTVSSGGGGSGGGGSGG |
| | GGSGGGGSGGGGSGGGGSMAQKRPACTLKPECVQQLLVCSQEAKKSAYCPYSHF |
| | PVGAALLTQEGRIFKGCNIENACYPLGICAERTAIQKAVSEGYKDFRAIAIASDMQD |
| | DFISPCGACRQVMREFGTNWPVYMTKPDGTYIVMTVQELLPSSFGPEDLQKTQHH |
| | HHHH (SEQ ID NO: 27) |
| Ab66_LC_ | DIQMTQSPSSLSASVGDRVTITCRASQSISSYLNWYQQKPGKAPKLLIYAASSLQSG |
| (G4S)3_HC_ | VPSRFSGSGSGTDFTLTISSLQPEDFATYYCQQSYIAPYTFGGGTKVEIKGGGGSGG |
| (G4S)7 | GGSGGGGSEVQLVESGGGLVQPGGSLRLSCAASGETFSDHYMDWVRQAPGKGLA |
| linker_CDA_ | SGETFSDHYMDWVRQAPGKGLEWVGRIRNKASSYTTEYAASVKGRFTISRDDSKN |
| HIS | SLYLQMNSLKTEDTAVYYCAREPKYWIDFDLWGRGTLVTVSSGGGGSGGGGSGG |
| | GGSGGGGSGGGGSGGGGSGGGGSMAQKRPACTLKPECVQQLLVCSQEAKKSAYC |
| | PYSHFPVGAALLTQEGRIFKGCNIENACYPLGICAERTAIQKAVSEGYKDFRAIAIAS |
| | DMQDDFISPCGACRQVMREFGTNWPVYMTKPDGTYIVMTVQELLPSSFGPEDLQK |
| | TQHHHHHH (SEQ ID NO: 28) |
| Ab66_LC_ | DIQMTQSPSSLSASVGDRVTITCRASQSISSYLNWYQQKPGKAPKLLIYAASSLQSG |
| (G4S)3_HC_ | VPSRFSGSGSGTDFTLTISSLQPEDFATYYCQQSYIAPYTFGGGTKVEIKGGGGSGG |
| (G4S)8 | GGSGGGGSEVQLVESGGGLVQPGGSLRLSCAASGETFSDHYMDWVRQAPGKGLA |
| linker_CDA_ | SGETFSDHYMDWVRQAPGKGLEWVGRIRNKASSYTTEYAASVKGRFTISRDDSKN |
| HIS | SLYLQMNSLKTEDTAVYYCAREPKYWIDFDLWGRGTLVTVSSGGGGSGGGGSGG |
| | GGSGGGGSGGGGSGGGGSGGGGGGGGSMAQKRPACTLKPECVQQLLVCSQEAK |
| | KSAYCPYSHFPVGAALLTQEGRIFKGCNIENACYPLGICAERTAIQKAVSEGYKDFR |
| | AIAIASDMQDDFISPCGACRQVMREFGTNWPVYMTKPDGTYIVMTVQELLPSSFGP |
| | EDLQKTQHHHHHH (SEQ ID NO: 29) |
| Ab66_LC_ | DIQMTQSPSSLSASVGDRVTITCRASQSISSYLNWYQQKPGKAPKLLIYAASSLQSG |
| (G4S)3_HC_ | VPSRFSGSGSGTDFTLTISSLQPEDFATYYCQQSYIAPYTFGGGTKVEIKGGGGSGG |
| (G4S)9 | GGSGGGGSEVQLVESGGGLVQPGGSLRLSCAASGETFSDHYMDWVRQAPGKGLA |
| linker_CDA_ | SGETFSDHYMDWVRQAPGKGLEWVGRIRNKASSYTTEYAASVKGRFTISRDDSKN |
| HIS | SLYLQMNSLKTEDTAVYYCAREPKYWIDFDLWGRGTLVTVSSGGGGSGGGGSGG |
| | GGSGGGGSGGGGSGGGGSGGGGSGGGGSGGGGSMAQKRPACTLKPECVQQLLV |
| | CSQEAKKSAYCPYSHFPVGAALLTQEGRIFKGCNIENACYPLGICAERTAIQKAVSE |
| | GYKDFRAIAIASDMQDDFISPCGACRQVMREFGTNWPVYMTKPDGTYIVMTVQEL |
| | LPSSFGPEDLQKTQHHHHHH (SEQ ID NO: 30) |
| Ab66_LC_ | DIQMTQSPSSLSASVGDRVTITCRASQSISSYLNWYQQKPGKAPKLLIYAASSLQSG |
| (G4S)3_HC_ | VPSRFSGSGSGTDFTLTISSLQPEDFATYYCQQSYIAPYTFGGGTKVEIKGGGGSGG |
| (G4S)10 | GGSGGGGSEVQLVESGGGLVQPGGSLRLSCAASGETFSDHYMDWVRQAPGKGLA |
| linker_CDA_ | SGETFSDHYMDWVRQAPGKGLEWVGRIRNKASSYTTEYAASVKGRFTISRDDSKN |
| HIS | SLYLQMNSLKTEDTAVYYCAREPKYWIDFDLWGRGTLVTVSSGGGGSGGGGSGG |
| | GGSGGGGSGGGGSGGGGSGGGGSGGGGSGGGGSGGGGSMAQKRPACTLKPECV |
| | QQLLVCSQEAKKSAYCPYSHFPVGAALLTQEGRIFKGCNIENACYPLGICAERTAIQ |
| | KAVSEGYKDFRAIAIASDMQDDFISPCGACRQVMREFGTNWPVYMTKPDGTYIVM |
| | TVQELLPSSFGPEDLQKTQHHHHHH (SEQ ID NO: 31) |
| Ab66_LC_ | DIQMTQSPSSLSASVGDRVTITCRASQSISSYLNWYQQKPGKAPKLLIYAASSLQSG |
| (G4S)3_HC_ | VPSRFSGSGSGTDFTLTISSLQPEDFATYYCQQSYIAPYTFGGGTKVEIKGGGGSGG |
| (G4S)11 | GGSGGGGSEVQLVESGGGLVQPGGSLRLSCAASGETFSDHYMDWVRQAPGKGLA |
| linker_CDA_ | SGETFSDHYMDWVRQAPGKGLEWVGRIRNKASSYTTEYAASVKGRFTISRDDSKN |
| HIS | SLYLQMNSLKTEDTAVYYCAREPKYWIDFDLWGRGTLVTVSSGGGGSGGGGSGG |
| | GGSGGGGSGGGGSGGGGSGGGGSGGGGSGGGGSGGGGSGGGGSMAQKRPACTL |
| | KPECVQQLLVCSQEAKKSAYCPYSHFPVGAALLTQEGRIFKGCNIENACYPLGICA |
| | ERTAIQKAVSEGYKDFRAIAIASDMQDDFISPCGACRQVMREFGTNWPVYMTKPD |
| | GTYIVMTVQELLPSSFGPEDLQKTQHHHHHH (SEQ ID NO: 32) |
| Ab66_LC_ | DIQMTQSPSSLSASVGDRVTITCRASQSISSYLNWYQQKPGKAPKLLIYAASSLQSG |
| (G4S)3_HC_ | VPSRFSGSGSGTDFTLTISSLQPEDFATYYCQQSYIAPYTFGGGTKVEIKGGGGSGG |
| (G4S)112 | GGSGGGGSEVQLVESGGGLVQPGGSLRLSCAASGETFSDHYMDWVRQAPGKGLA |
| linker_CDA_ | SGETFSDHYMDWVRQAPGKGLEWVGRIRNKASSYTTEYAASVKGRFTISRDDSKN |
| HIS | SLYLQMNSLKTEDTAVYYCAREPKYWIDFDLWGRGTLVTVSSGGGGSGGGGSGG |
| | GGSGGGGSGGGGSGGGGSGGGGSGGGGSGGGGSGGGGSGGGGSGGGGSMAQKR |
| | PACTLKPECVQQLLVCSQEAKKSAYCPYSHFPVGAALLTQEGRIFKGCNIENACYP |
| | LGICAERTAIQKAVSEGYKDFRAIAIASDMQDDFISPCGACRQVMREFGTNWPVY |
| | MTKPDGTYIVMTVQELLPSSFGPEDLQKTQHHHHHH (SEQ ID NO: 33) |
| Ab68_LC_ | DIQMTQSPSSLSASVGDRVTITCRASQSISSYLNWYQQKPGKAPKLLIYAASSLQSG |
| (G4S)3_HC_G4S | VPSRFSGSGSGTDFTLTISSLQPEDFATYYCQQSYIAPYTFGGGTKVEIKGGGGSGG |
| linker_CDA_ | GGSGGGGSEVQLVESGGGLVQPGRSLRLSCTASGFTFSDHDMNWVRQAPGKGLE |
| HIS | WVGRTRNAAGSYTTEYAASVKGRFTISRDDSKNSLYLQMNSLKTEDTAVYYCAR |
| | EPKYWIDFDLWGRGTLVTSSGGGGSMAQKRPACTLKPECVQQLLVCSQEAKKSA |
| | YCPYSHFPVGAALLTQEGRIFKGCNIENACYPLGICAERTAIQKAVSEGYKDFRAIA |
| | IASDMQDDFISPCGACRQVMREFGTNWPVYMTKPDGTYIVMTVQELLPSSFGPED |
| | LQKTQHHHHHH (SEQ ID NO: 34) |
| Ab68_LC_ | DIQMTQSPSSLSASVGDRVTITCRASQSISSYLNWYQQKPGKAPKLLIYAASSLQSG |
| (G4S)3_HC_ | VPSRFSGSGSGTDFTLTISSLQPEDFATYYCQQSYIAPYTFGGGTKVEIKGGGGSGG |
| (G4S)3 | GGSGGGGSEVQLVESGGGLVQPGRSLRLSCTASGFTFSDHDMNWVRQAPGKGLE |
| linker_CDA_ | WVGRTRNAAGSYTTEYAASVKGRFTISRDDSKNSLYLQMNSLKTEDTAVYYCAR |
| HIS | EPKYWIDFDLWGRGTLVTSSGGGGSGGGGSGGGGSMAQKRPACTLKPECVQQLL |
| | VCSQEAKKSAYCPYSHFPVGAALLTQEGRIFKGCNIENACYPLGICAERTAIQKAVS |
| | EGYKDFRAIAIASDMQDDFISPCGACRQVMREFGTNWPVYMTKPDGTYIVMTVQE |
| | LLPSSFGPEDLQKTQHHHHHH (SEQ ID NO: 35) |
| Ab68_LC_ | DIQMTQSPSSLSASVGDRVTITCRASQSISSYLNWYQQKPGKAPKLLIYAASSLQSG |
| (G4S)3_HC_ | VPSRFSGSGSGTDFTLTISSLQPEDFATYYCQQSYIAPYTFGGGTKVEIKGGGGSGG |
| (G4S)4 | GGSGGGGSEVQLVESGGGLVQPGRSLRLSCTASGFTFSDHDMNWVRQAPGKGLE |
| linker_CDA_ | WVGRTRNAAGSYTTEYAASVKGRFTISRDDSKNSLYLQMNSLKTEDTAVYYCAR |
| HIS | EPKYWIDFDLWGRGTLVTSSGGGGSGGGGSGGGGSGGGGSMAQKRPACTLKPEC |
| | VQQLLVCSQEAKKSAYCPYSHFPVGAALLTQEGRIFKGCNIENACYPLGICAERTAI |
| | QKAVSEGYKDFRAIAIASDMQDDFISPCGACRQVMREFGTNWPVYMTKPDGTYIV |
| | MTVQELLPSSFGPEDLQKTQHHHHHH (SEQ ID NO: 36) |
| Ab68_LC_ | DIQMTQSPSSLSASVGDRVTITCRASQSISSYLNWYQQKPGKAPKLLIYAASSLQSG |
| (G4S)3_HC_ | VPSRFSGSGSGTDFTLTISSLQPEDFATYYCQQSYIAPYTFGGGTKVEIKGGGGSGG |
| (G4S)5 | GGSGGGGSEVQLVESGGGLVQPGRSLRLSCTASGFTFSDHDMNWVRQAPGKGLE |
| linker_CDA_ | WVGRTRNAAGSYTTEYAASVKGRFTISRDDSKNSLYLQMNSLKTEDTAVYYCAR |
| HIS | EPKYWIDFDLWGRGTLVTSSGGGGSGGGGSGGGGSGGGGSGGGGSMAQKRPACT |
| | LKPECVQQLLVCSQEAKKSAYCPYSHFPVGAALLTQEGRIFKGCNIENACYPLGIC |
| | AERTAIQKAVSEGYKDFRAIAIASDMQDDFISPCGACRQVMREFGTNWPVYMTKP |
| | DGTYIVMTVQELLPSSFGPEDLQKTQHHHHHH (SEQ ID NO: 37) |
| Ab68_LC_ | DIQMTQSPSSLSASVGDRVTITCRASQSISSYLNWYQQKPGKAPKLLIYAASSLQSG |
| (G4S)3_HC_ | VPSRFSGSGSGTDFTLTISSLQPEDFATYYCQQSYIAPYTFGGGTKVEIKGGGGSGG |
| (G4S)6 | GGSGGGGSEVQLVESGGGLVQPGRSLRLSCTASGFTFSDHDMNWVRQAPGKGLE |
| linker_CDA_ | WVGRTRNAAGSYTTEYAASVKGRFTISRDDSKNSLYLQMNSLKTEDTAVYYCAR |
| HIS | EPKYWIDFDLWGRGTLVTSSGGGGSGGGGSGGGGSGGGGSGGGGSGGGGSMAQ |
| | KRPACTLKPECVQQLLVCSQEAKKSAYCPYSHFPVGAALLTQEGRIFKGCNIENAC |
| | YPLGICAERTAIQKAVSEGYKDFRAIAIASDMQDDFISPCGACRQVMREFGTNWPV |
| | YMTKPDGTYIVMTVQELLPSSFGPEDLQKTQHHHHHH (SEQ ID NO: 38) |
| Ab68_LC_ | DIQMTQSPSSLSASVGDRVTITCRASQSISSYLNWYQQKPGKAPKLLIYAASSLQSG |
| (G4S)3_HC_ | VPSRFSGSGSGTDFTLTISSLQPEDFATYYCQQSYIAPYTFGGGTKVEIKGGGGSGG |
| (G4S)7 | GGSGGGGSEVQLVESGGGLVQPGRSLRLSCTASGFTFSDHDMNWVRQAPGKGLE |
| linker_CDA_ | WVGRTRNAAGSYTTEYAASVKGRFTISRDDSKNSLYLQMNSLKTEDTAVYYCAR |
| HIS | EPKYWIDFDLWGRGTLVTSSGGGGSGGGGSGGGGSGGGGSGGGGSGGGGSGGGG |
| | SMAQKRPACTLKPECVQQLLVCSQEAKKSAYCPYSHFPVGAALLTQEGRIFKGCNI |
| | ENACYPLGICAERTAIQKAVSEGYKDFRAIAIASDMQDDFISPCGACRQVMREFGT |
| | NWPVYMTKPDGTYIVMTVQELLPSSFGPEDLQKTQHHHHHH (SEQ ID NO: 39) |
| Ab68_LC_ | DIQMTQSPSSLSASVGDRVTITCRASQSISSYLNWYQQKPGKAPKLLIYAASSLQSG |
| (G4S)3_HC_ | VPSRFSGSGSGTDFTLTISSLQPEDFATYYCQQSYIAPYTFGGGTKVEIKGGGGSGG |
| (G4S)8 | GGSGGGGSEVQLVESGGGLVQPGRSLRLSCTASGFTFSDHDMNWVRQAPGKGLE |
| linker_CDA_ | WVGRTRNAAGSYTTEYAASVKGRFTISRDDSKNSLYLQMNSLKTEDTAVYYCAR |
| HIS | EPKYWIDFDLWGRGTLVTSSGGGGSGGGGSGGGGSGGGGSGGGGSGGGGSGGGG |
| | SGGGGSMAQKRPACTLKPECVQQLLVCSQEAKKSAYCPYSHFPVGAALLTQEGRI |
| | FKGCNIENACYPLGICAERTAIQKAVSEGYKDFRAIAIASDMQDDFISPCGACRQV |
| | MREFGTNWPVYMTKPDGTYIVMTVQELLPSSFGPEDLQKTQHHHHHH (SEQ ID |
| | NO: 40) |
| Ab68_LC_ | DIQMTQSPSSLSASVGDRVTITCRASQSISSYLNWYQQKPGKAPKLLIYAASSLQSG |
| (G4S)3_HC_ | VPSRFSGSGSGTDFTLTISSLQPEDFATYYCQQSYIAPYTFGGGTKVEIKGGGGSGG |
| (G4S)9 | GGSGGGGSEVQLVESGGGLVQPGRSLRLSCTASGFTFSDHDMNWVRQAPGKGLE |
| linker_CDA_ | WVGRTRNAAGSYTTEYAASVKGRFTISRDDSKNSLYLQMNSLKTEDTAVYYCAR |
| HIS | EPKYWIDFDLWGRGTLVTSSGGGGSGGGGSGGGGSGGGGSGGGGSGGGGSGGGG |
| | SGGGGGGGGSMAQKRPACTLKPECVQQLLVCSQEAKKSAYCPYSHFPVGAALLT |
| | QEGRIFKGCNIENACYPLGICAERTAIQKAVSEGYKDFRAIAIASDMQDDFISPCGA |
| | CRQVMREFGTNWPVYMTKPDGTYIVMTVQELLPSSFGPEDLQKTQHHHHHH |
| | (SEQ ID NO: 41) |
| Ab68_LC_ | DIQMTQSPSSLSASVGDRVTITCRASQSISSYLNWYQQKPGKAPKLLIYAASSLQSG |
| (G4S)3_HC_ | VPSRFSGSGSGTDFTLTISSLQPEDFATYYCQQSYIAPYTFGGGTKVEIKGGGGSGG |
| (G4S)10 | GGSGGGGSEVQLVESGGGLVQPGRSLRLSCTASGFTFSDHDMNWVRQAPGKGLE |
| linker_CDA_ | WVGRTRNAAGSYTTEYAASVKGRFTISRDDSKNSLYLQMNSLKTEDTAVYYCAR |
| HIS | EPKYWIDFDLWGRGTLVTSSGGGGSGGGGSGGGGSGGGGSGGGGSGGGGSGGGG |
| | SGGGGSGGGGSGGGGSMAQKRPACTLKPECVQQLLVCSQEAKKSAYCPYSHFPV |
| | GAALLTQEGRIFKGCNIENACYPLGICAERTAIQKAVSEGYKDFRAIAIASDMQDDF |
| | ISPCGACRQVMREFGTNWPVYMTKPDGTYIVMTVQELLPSSFGPEDLQKTQHHHH |
| | HH (SEQ ID NO: 42) |
| Ab68_LC_ | DIQMTQSPSSLSASVGDRVTITCRASQSISSYLNWYQQKPGKAPKLLIYAASSLQSG |
| (G4S)3_HC_ | VPSRFSGSGSGTDFTLTISSLQPEDFATYYCQQSYIAPYTFGGGTKVEIKGGGGSGG |
| (G4S)11 | GGSGGGGSEVQLVESGGGLVQPGRSLRLSCTASGFTFSDHDMNWVRQAPGKGLE |
| linker_CDA_ | WVGRTRNAAGSYTTEYAASVKGRFTISRDDSKNSLYLQMNSLKTEDTAVYYCAR |
| HIS | EPKYWIDFDLWGRGTLVTSSGGGGSGGGGSGGGGSGGGGSGGGGSGGGGSGGGG |
| | SGGGGSGGGGSGGGGSGGGGSMAQKRPACTLKPECVQQLLVCSQEAKKSAYCPY |
| | SHFPVGAALLTQEGRIFKGCNIENACYPLGICAERTAIQKAVSEGYKDFRAIAIASD |
| | MQDDFISPCGACRQVMREFGTNWPVYMTKPDGTYIVMTVQELLPSSFGPEDLQKT |
| | QHHHHHH (SEQ ID NO: 43) |
| Ab68_LC_ | DIQMTQSPSSLSASVGDRVTITCRASQSISSYLNWYQQKPGKAPKLLIYAASSLQSG |
| (G4S)3_HC_ | VPSRFSGSGSGTDFTLTISSLQPEDFATYYCQQSYIAPYTFGGGTKVEIKGGGGSGG |
| (G4S)112 | GGSGGGGSEVQLVESGGGLVQPGRSLRLSCTASGFTFSDHDMNWVRQAPGKGLE |
| linker_CDA_ | WVGRTRNAAGSYTTEYAASVKGRFTISRDDSKNSLYLQMNSLKTEDTAVYYCAR |
| HIS | EPKYWIDFDLWGRGTLVTSSGGGGSGGGGSGGGGSGGGGSGGGGSGGGGSGGGG |
| | SGGGGSGGGGSGGGGSGGGGSGGGGSMAQKRPACTLKPECVQQLLVCSQEAKKS |
| | AYCPYSHFPVGAALLTQEGRIFKGCNIENACYPLGICAERTAIQKAVSEGYKDFRAI |
| | AIASDMQDDFISPCGACRQVMREFGTNWPVYMTKPDGTYIVMTVQELLPSSFGPE |
| | DLQKTQHHHHHH (SEQ ID NO: 44) |
| Ab69_LC_ | EVQLVESGGGLVQPGGSLRLSCAASGETFVDHDMDWVRQAPGKGLEWVGRTRN |
| (G4S)3_HC_G4S | KLGSYTTEYAASVKGRETGRDDSKNSLYLQMNSLKTEDTAVYYCAREPKYWIDF |
| linker_CDA_ | DLWGRGTLVTVSSGGGGSGGGGSGGGGSDIQMTQSPSSLSASVGDRVTITCRASQS |
| HIS | ISSYLNWYQQKPGKAPKLLIYAASSLQSGVPSRFSGSGSGTDFTLTISSLQPEDFATY |
| | YCQQSYIAPYIFGGGTKVEIKGGGGSMAQKRPACTLKPECVQQLLVCSQEAKKSA |
| | YCPYSHFPVGAALLTQEGRIFKGCNIENACYPLGICAERTAIQKAVSEGYKDFRAIA |
| | IASDMQDDFISPCGACRQVMREFGTNWPVYMTKPDGTYIVMTVQELLPSSFGPED |
| | LQKTQHHHHHH (SEQ ID NO: 45) |
| Ab69_LC_ | EVQLVESGGGLVQPGGSLRLSCAASGETFVDHDMDWVRQAPGKGLEWVGRTRN |
| (G4S)3_HC_ | KLGSYTTEYAASVKGRETGRDDSKNSLYLQMNSLKTEDTAVYYCAREPKYWIDF |
| (G4S)3 | DLWGRGTLVTVSSGGGGSGGGGSGGGGSDIQMTQSPSSLSASVGDRVTITCRASQS |
| linker_CDA_ | ISSYLNWYQQKPGKAPKLLIYAASSLQSGVPSRFSGSGSGTDFTLTISSLQPEDFATY |
| HIS | YCQQSYIAPYIFGGGTKVEIKGGGGSGGGGSGGGGSMAQKRPACTLKPECVQQLL |
| | VCSQEAKKSAYCPYSHFPVGAALLTQEGRIFKGCNIENACYPLGICAERTAIQKAVS |
| | EGYKDFRAIAIASDMQDDFISPCGACRQVMREFGTNWPVYMTKPDGTYIVMTVQE |
| | LLPSSFGPEDLQKTQHHHHHH (SEQ ID NO: 46) |
| Ab69_LC_ | EVQLVESGGGLVQPGGSLRLSCAASGETFVDHDMDWVRQAPGKGLEWVGRTRN |
| (G4S)3_HC_ | KLGSYTTEYAASVKGRETGRDDSKNSLYLQMNSLKTEDTAVYYCAREPKYWIDF |
| (G4S)4 | DLWGRGTLVTVSSGGGGSGGGGSGGGGSDIQMTQSPSSLSASVGDRVTITCRASQS |
| linker_CDA_ | ISSYLNWYQQKPGKAPKLLIYAASSLQSGVPSRFSGSGSGTDFTLTISSLQPEDFATY |
| HIS | YCQQSYIAPYIFGGGTKVEIKGGGGGGGGSGGGGSGGGGSMAQKRPACTLKPEC |
| | VQQLLVCSQEAKKSAYCPYSHFPVGAALLTQEGRIFKGCNIENACYPLGICAERTAI |
| | QKAVSEGYKDFRAIAIASDMQDDFISPCGACRQVMREFGTNWPVYMTKPDGTYIV |
| | MTVQELLPSSFGPEDLQKTQHHHHHH (SEQ ID NO: 47) |
| Ab69_LC_ | EVQLVESGGGLVQPGGSLRLSCAASGETFVDHDMDWVRQAPGKGLEWVGRTRN |
| (G4S)3_HC_ | KLGSYTTEYAASVKGRETGRDDSKNSLYLQMNSLKTEDTAVYYCAREPKYWIDF |
| (G4S)5 | DLWGRGTLVTVSSGGGGSGGGGSGGGGSDIQMTQSPSSLSASVGDRVTITCRASQS |
| linker_CDA_ | ISSYLNWYQQKPGKAPKLLIYAASSLQSGVPSRFSGSGSGTDFTLTISSLQPEDFATY |
| HIS | YCQQSYIAPYIFGGGTKVEIKGGGGSGGGGSGGGGSGGGGSGGGGSMAQKRPACT |
| | LKPECVQQLLVCSQEAKKSAYCPYSHFPVGAALLTQEGRIFKGCNIENACYPLGIC |
| | AERTAIQKAVSEGYKDFRAIAIASDMQDDFISPCGACRQVMREFGTNWPVYMTKP |
| | DGTYIVMTVQELLPSSFGPEDLQKTQHHHHHH (SEQ ID NO: 48) |
| Ab69_LC_ | EVQLVESGGGLVQPGGSLRLSCAASGETFVDHDMDWVRQAPGKGLEWVGRTRN |
| (G4S)3_HC_ | KLGSYTTEYAASVKGRETGRDDSKNSLYLQMNSLKTEDTAVYYCAREPKYWIDF |
| (G4S)6 | DLWGRGTLVTVSSGGGGSGGGGSGGGGSDIQMTQSPSSLSASVGDRVTITCRASQS |
| linker_CDA_ | ISSYLNWYQQKPGKAPKLLIYAASSLQSGVPSRFSGSGSGTDFTLTISSLQPEDFATY |
| HIS | YCQQSYIAPYIFGGGTKVEIKGGGGSGGGGSGGGGSGGGGSGGGGSGGGGSMAQ |
| | KRPACTLKPECVQQLLVCSQEAKKSAYCPYSHFPVGAALLTQEGRIFKGCNIENAC |
| | YPLGICAERTAIQKAVSEGYKDFRAIAIASDMQDDFISPCGACRQVMREFGTNWPV |
| | YMTKPDGTYIVMTVQELLPSSFGPEDLQKTQHHHHHH (SEQ ID NO: 49) |
| Ab69_LC_ | EVQLVESGGGLVQPGGSLRLSCAASGETFVDHDMDWVRQAPGKGLEWVGRTRN |
| (G4S)3_HC_ | KLGSYTTEYAASVKGRETGRDDSKNSLYLQMNSLKTEDTAVYYCAREPKYWIDF |
| (G4S)7 | DLWGRGTLVTVSSGGGGSGGGGSGGGGSDIQMTQSPSSLSASVGDRVTITCRASQS |
| linker_CDA_ | ISSYLNWYQQKPGKAPKLLIYAASSLQSGVPSRFSGSGSGTDFTLTISSLQPEDFATY |
| HIS | YCQQSYIAPYIFGGGTKVEIKGGGGSGGGGSGGGGSGGGGSGGGGSGGGGSGGGG |
| | SMAQKRPACTLKPECVQQLLVCSQEAKKSAYCPYSHFPVGAALLTQEGRIFKGCNI |
| | ENACYPLGICAERTAIQKAVSEGYKDFRAIAIASDMQDDFISPCGACRQVMREFGT |
| | NWPVYMTKPDGTYIVMTVQELLPSSFGPEDLQKTQHHHHHH (SEQ ID NO: 50) |
| Ab69_LC_ | EVQLVESGGGLVQPGGSLRLSCAASGETFVDHDMDWVRQAPGKGLEWVGRTRN |
| (G4S)3_HC_ | KLGSYTTEYAASVKGRETGRDDSKNSLYLQMNSLKTEDTAVYYCAREPKYWIDF |
| (G4S)8 | DLWGRGTLVTVSSGGGGSGGGGSGGGGSDIQMTQSPSSLSASVGDRVTITCRASQS |
| linker_CDA_ | ISSYLNWYQQKPGKAPKLLIYAASSLQSGVPSRFSGSGSGTDFTLTISSLQPEDFATY |
| HIS | YCQQSYIAPYIFGGGTKVEIKGGGGSGGGGGGGGSGGGGSGGGGSGGGGSGGGG |
| | SGGGGSMAQKRPACTLKPECVQQLLVCSQEAKKSAYCPYSHFPVGAALLTQEGRI |
| | FKGCNIENACYPLGICAERTAIQKAVSEGYKDFRAIAIASDMQDDFISPCGACRQV |
| | MREFGTNWPVYMTKPDGTYIVMTVQELLPSSFGPEDLQKTQHHHHHH (SEQ ID |
| | NO: 51) |
| Ab69_LC_ | EVQLVESGGGLVQPGGSLRLSCAASGETFVDHDMDWVRQAPGKGLEWVGRTRN |
| (G4S)3_HC_ | KLGSYTTEYAASVKGRETGRDDSKNSLYLQMNSLKTEDTAVYYCAREPKYWIDF |
| (G4S)9 | DLWGRGTLVTVSSGGGGSGGGGSGGGGSDIQMTQSPSSLSASVGDRVTITCRASQS |
| linker_CDA_ | ISSYLNWYQQKPGKAPKLLIYAASSLQSGVPSRFSGSGSGTDFTLTISSLQPEDFATY |
| HIS | YCQQSYIAPYIFGGGTKVEIKGGGGSGGGGSGGGGSGGGGSGGGGSGGGGSGGGG |
| | SGGGGSGGGGSMAQKRPACTLKPECVQQLLVCSQEAKKSAYCPYSHFPVGAALLT |
| | QEGRIFKGCNIENACYPLGICAERTAIQKAVSEGYKDFRAIAIASDMQDDFISPCGA |
| | CRQVMREFGTNWPVYMTKPDGTYIVMTVQELLPSSFGPEDLQKTQHHHHHH |
| | (SEQ ID NO: 52) |
| Ab69_LC_ | EVQLVESGGGLVQPGGSLRLSCAASGETFVDHDMDWVRQAPGKGLEWVGRTRN |
| (G4S)3_HC_ | KLGSYTTEYAASVKGRETGRDDSKNSLYLQMNSLKTEDTAVYYCAREPKYWIDF |
| (G4S)10 | DLWGRGTLVTVSSGGGGSGGGGSGGGGSDIQMTQSPSSLSASVGDRVTITCRASQS |
| linker_CDA_ | ISSYLNWYQQKPGKAPKLLIYAASSLQSGVPSRFSGSGSGTDFTLTISSLQPEDFATY |
| HIS | YCQQSYIAPYIFGGGTKVEIKGGGGSGGGGSGGGGSGGGGSGGGGSGGGGSGGGG |
| | SGGGGSGGGGSGGGGSMAQKRPACTLKPECVQQLLVCSQEAKKSAYCPYSHFPV |
| | GAALLTQEGRIFKGCNIENACYPLGICAERTAIQKAVSEGYKDFRAIAIASDMQDDF |
| | ISPCGACRQVMREFGTNWPVYMTKPDGTYIVMTVQELLPSSFGPEDLQKTQHHHH |
| | HH (SEQ ID NO: 53) |
| Ab69_LC_ | EVQLVESGGGLVQPGGSLRLSCAASGETFVDHDMDWVRQAPGKGLEWVGRTRN |
| (G4S)3_HC_ | KLGSYTTEYAASVKGRETGRDDSKNSLYLQMNSLKTEDTAVYYCAREPKYWIDF |
| (G4S)11 | DLWGRGTLVTVSSGGGGSGGGGSGGGGSDIQMTQSPSSLSASVGDRVTITCRASQS |
| linker_CDA_ | ISSYLNWYQQKPGKAPKLLIYAASSLQSGVPSRFSGSGSGTDFTLTISSLQPEDFATY |
| HIS | YCQQSYIAPYIFGGGTKVEIKGGGGGGGGSGGGGSGGGGSGGGGSGGGGSGGGG |
| | SGGGGSGGGGSGGGGSGGGGSMAQKRPACTLKPECVQQLLVCSQEAKKSAYCPY |
| | SHFPVGAALLTQEGRIFKGCNIENACYPLGICAERTAIQKAVSEGYKDFRAIAIASD |
| | MQDDFISPCGACRQVMREFGTNWPVYMTKPDGTYIVMTVQELLPSSFGPEDLQKT |
| | QHHHHHH (SEQ ID NO: 54) |
| Ab69_LC_ | EVQLVESGGGLVQPGGSLRLSCAASGETFVDHDMDWVRQAPGKGLEWVGRTRN |
| (G4S)3_HC_ | KLGSYTTEYAASVKGRETGRDDSKNSLYLQMNSLKTEDTAVYYCAREPKYWIDF |
| (G4S)112 | DLWGRGTLVTVSSGGGGSGGGGSGGGGSDIQMTQSPSSLSASVGDRVTITCRASQS |
| linker_CDA_ | ISSYLNWYQQKPGKAPKLLIYAASSLQSGVPSRFSGSGSGTDFTLTISSLQPEDFATY |
| HIS | YCQQSYIAPYIFGGGTKVEIKGGGGSGGGGSGGGGSGGGGSGGGGSGGGGSGGGG |
| | SGGGGSGGGGGGGGSGGGGSGGGGSMAQKRPACTLKPECVQQLLVCSQEAKKS |
| | AYCPYSHFPVGAALLTQEGRIFKGCNIENACYPLGICAERTAIQKAVSEGYKDFRAI |
| | AIASDMQDDFISPCGACRQVMREFGTNWPVYMTKPDGTYIVMTVQELLPSSFGPE |
| | DLQKTQHHHHHH (SEQ ID NO: 55) |
| Ab58_HC_ | EVQLLESGGGLVQPGGSLRLSCAASGETFSNYAMSWVRQAPGKGLEWVSAISGSG |
| (G4S)3_LC_G4S | GSTYYADSVKGRFTISRDNSKNTLYLQMNSLRAEDTAVYYCAKGPPTYHTNYYY |
| linker_CDA_ | MDVWGKGTTVTVSSGGGGSGGGGSGGGGSDIQMTQSPSSVSASVGDRVTITCRAS |
| HIS | QGISSWLAWYQQKPGKAPKLLLIYAASSLQSGVPSRFSGSGSGTDFTLTISSLQPED |
| | FATYYCQQTNSFPYTFGGGTKVEIKGGGGSMAQKRPACTLKPECVQQLLVCSQEA |
| | KKSAYCPYSHFPVGAALLTQEGRIFKGCNIENACYPLGICAERTAIQKAVSEGYKDF |
| | RAIAIASDMQDDFISPCGACRQVMREFGTNWPVYMTKPDGTYIVMTVQELLPSSFG |
| | PEDLQKTQHHHHHH (SEQ ID NO: 56) |
| Ab58_HC_ | EVQLLESGGGLVQPGGSLRLSCAASGETFSNYAMSWVRQAPGKGLEWVSAISGSG |
| (G4S)3_LC_ | GSTYYADSVKGRFTISRDNSKNTLYLQMNSLRAEDTAVYYCAKGPPTYHTNYYY |
| (G4S)3 | MDVWGKGTTVTVSSGGGGSGGGGSGGGGSDIQMTQSPSSVSASVGDRVTITCRAS |
| linker_CDA_ | QGISSWLAWYQQKPGKAPKLLLIYAASSLQSGVPSRFSGSGSGTDFTLTISSLQPED |
| HIS | FATYYCQQTNSFPYTFGGGTKVEIKGGGGSGGGGSGGGGSMAQKRPACTLKPECV |
| | QQLLVCSQEAKKSAYCPYSHFPVGAALLTQEGRIFKGCNIENACYPLGICAERTAIQ |
| | KAVSEGYKDFRAIAIASDMQDDFISPCGACRQVMREFGTNWPVYMTKPDGTYIVM |
| | TVQELLPSSFGPEDLQKTQHHHHHH (SEQ ID NO: 57) |
| Ab58_HC_ | EVQLLESGGGLVQPGGSLRLSCAASGETFSNYAMSWVRQAPGKGLEWVSAISGSG |
| (G4S)3_LC_ | GSTYYADSVKGRFTISRDNSKNTLYLQMNSLRAEDTAVYYCAKGPPTYHTNYYY |
| (G4S)4 | MDVWGKGTTVTVSSGGGGSGGGGSGGGGSDIQMTQSPSSVSASVGDRVTITCRAS |
| linker_CDA_ | QGISSWLAWYQQKPGKAPKLLLIYAASSLQSGVPSRFSGSGSGTDFTLTISSLQPED |
| HIS | FATYYCQQTNSFPYTFGGGTKVEIKGGGGSGGGGSGGGGSGGGGSMAQKRPACT |
| | LKPECVQQLLVCSQEAKKSAYCPYSHFPVGAALLTQEGRIFKGCNIENACYPLGIC |
| | AERTAIQKAVSEGYKDFRAIAIASDMQDDFISPCGACRQVMREFGTNWPVYMTKP |
| | DGTYIVMTVQELLPSSFGPEDLQKTQHHHHHH (SEQ ID NO: 58) |
| Ab58_HC_ | EVQLLESGGGLVQPGGSLRLSCAASGETFSNYAMSWVRQAPGKGLEWVSAISGSG |
| (G4S)3_LC_ | GSTYYADSVKGRFTISRDNSKNTLYLQMNSLRAEDTAVYYCAKGPPTYHTNYYY |
| (G4S)5 | MDVWGKGTTVTVSSGGGGSGGGGSGGGGSDIQMTQSPSSVSASVGDRVTITCRAS |
| linker_CDA_ | QGISSWLAWYQQKPGKAPKLLLIYAASSLQSGVPSRFSGSGSGTDFTLTISSLQPED |
| HIS | FATYYCQQTNSFPYTFGGGTKVEIKGGGGSGGGGSGGGGSGGGGSGGGGSMAQK |
| | RPACTLKPECVQQLLVCSQEAKKSAYCPYSHFPVGAALLTQEGRIFKGCNIENACY |
| | PLGICAERTAIQKAVSEGYKDFRAIAIASDMQDDFISPCGACRQVMREFGTNWPVY |
| | MTKPDGTYIVMTVQELLPSSFGPEDLQKTQHHHHHH (SEQ ID NO: 59) |
| Ab58_HC_ | EVQLLESGGGLVQPGGSLRLSCAASGETFSNYAMSWVRQAPGKGLEWVSAISGSG |
| (G4S)3_LC_ | GSTYYADSVKGRFTISRDNSKNTLYLQMNSLRAEDTAVYYCAKGPPTYHTNYYY |
| (G4S)6 | MDVWGKGTTVTVSSGGGGSGGGGSGGGGSDIQMTQSPSSVSASVGDRVTITCRAS |
| linker_CDA_ | QGISSWLAWYQQKPGKAPKLLLIYAASSLQSGVPSRFSGSGSGTDFTLTISSLQPED |
| HIS | FATYYCQQTNSFPYTFGGGTKVEIKGGGGSGGGGSGGGGSGGGGSGGGGSGGGG |
| | SMAQKRPACTLKPECVQQLLVCSQEAKKSAYCPYSHFPVGAALLTQEGRIFKGCNI |
| | ENACYPLGICAERTAIQKAVSEGYKDFRAIAIASDMQDDFISPCGACRQVMREFGT |
| | NWPVYMTKPDGTYIVMTVQELLPSSFGPEDLQKTQHHHHHH (SEQ ID NO: 60) |
| Ab58_HC_ | EVQLLESGGGLVQPGGSLRLSCAASGETFSNYAMSWVRQAPGKGLEWVSAISGSG |
| (G4S)3_LC_ | GSTYYADSVKGRFTISRDNSKNTLYLQMNSLRAEDTAVYYCAKGPPTYHTNYYY |
| (G4S)7 | MDVWGKGTTVTVSSGGGGSGGGGSGGGGSDIQMTQSPSSVSASVGDRVTITCRAS |
| linker_CDA_ | QGISSWLAWYQQKPGKAPKLLLIYAASSLQSGVPSRFSGSGSGTDFTLTISSLQPED |
| HIS | FATYYCQQTNSFPYTFGGGTKVEIKGGGGSGGGGSGGGGSGGGGSGGGGSGGGG |
| | SGGGGSMAQKRPACTLKPECVQQLLVCSQEAKKSAYCPYSHFPVGAALLTQEGRI |
| | FKGCNIENACYPLGICAERTAIQKAVSEGYKDFRAIAIASDMQDDFISPCGACRQV |
| | MREFGTNWPVYMTKPDGTYIVMTVQELLPSSFGPEDLQKTQHHHHHH (SEQ ID |
| | NO: 61) |
| Ab58_HC_ | EVQLLESGGGLVQPGGSLRLSCAASGETFSNYAMSWVRQAPGKGLEWVSAISGSG |
| (G4S)3_LC_ | GSTYYADSVKGRFTISRDNSKNTLYLQMNSLRAEDTAVYYCAKGPPTYHTNYYY |
| (G4S)8 | MDVWGKGTTVTVSSGGGGSGGGGSGGGGSDIQMTQSPSSVSASVGDRVTITCRAS |
| linker_CDA_ | QGISSWLAWYQQKPGKAPKLLLIYAASSLQSGVPSRFSGSGSGTDFTLTISSLQPED |
| HIS | FATYYCQQTNSFPYTFGGGTKVEIKGGGGSGGGGSGGGGSGGGGSGGGGSGGGG |
| | SGGGGSGGGGSMAQKRPACTLKPECVQQLLVCSQEAKKSAYCPYSHFPVGAALLT |
| | QEGRIFKGCNIENACYPLGICAERTAIQKAVSEGYKDFRAIAIASDMQDDFISPCGA |
| | CRQVMREFGTNWPVYMTKPDGTYIVMTVQELLPSSFGPEDLQKTQHHHHHH |
| | (SEQ ID NO: 62) |
| Ab58_HC_ | EVQLLESGGGLVQPGGSLRLSCAASGETFSNYAMSWVRQAPGKGLEWVSAISGSG |
| (G4S)3_LC_ | GSTYYADSVKGRFTISRDNSKNTLYLQMNSLRAEDTAVYYCAKGPPTYHTNYYY |
| (G4S)9 | MDVWGKGTTVTVSSGGGGSGGGGSGGGGSDIQMTQSPSSVSASVGDRVTITCRAS |
| linker_CDA_ | QGISSWLAWYQQKPGKAPKLLLIYAASSLQSGVPSRFSGSGSGTDFTLTISSLQPED |
| HIS | FATYYCQQTNSFPYTFGGGTKVEIKGGGGSGGGGSGGGGSGGGGSGGGGSGGGG |
| | SGGGGSGGGGSGGGGSMAQKRPACTLKPECVQQLLVCSQEAKKSAYCPYSHFPV |
| | GAALLTQEGRIFKGCNIENACYPLGICAERTAIQKAVSEGYKDFRAIAIASDMQDDF |
| | ISPCGACRQVMREFGTNWPVYMTKPDGTYIVMTVQELLPSSFGPEDLQKTQHHHH |
| | HH (SEQ ID NO: 63) |
| Ab58_HC_ | EVQLLESGGGLVQPGGSLRLSCAASGETFSNYAMSWVRQAPGKGLEWVSAISGSG |
| (G4S)3_LC_ | GSTYYADSVKGRFTISRDNSKNTLYLQMNSLRAEDTAVYYCAKGPPTYHTNYYY |
| (G4S)10 | MDVWGKGTTVTVSSGGGGSGGGGSGGGGSDIQMTQSPSSVSASVGDRVTITCRAS |
| linker_CDA_ | QGISSWLAWYQQKPGKAPKLLLIYAASSLQSGVPSRFSGSGSGTDFTLTISSLQPED |
| HIS | FATYYCQQTNSFPYTFGGGTKVEIKGGGGSGGGGSGGGGSGGGGSGGGGSGGGG |
| | SGGGGSGGGGSGGGGSGGGGSMAQKRPACTLKPECVQQLLVCSQEAKKSAYCPY |
| | SHFPVGAALLTQEGRIFKGCNIENACYPLGICAERTAIQKAVSEGYKDFRAIAIASD |
| | MQDDFISPCGACRQVMREFGTNWPVYMTKPDGTYIVMTVQELLPSSFGPEDLQKT |
| | QHHHHHH (SEQ ID NO: 64) |
| Ab58_HC_ | EVQLLESGGGLVQPGGSLRLSCAASGETFSNYAMSWVRQAPGKGLEWVSAISGSG |
| (G4S)3_LC_ | GSTYYADSVKGRFTISRDNSKNTLYLQMNSLRAEDTAVYYCAKGPPTYHTNYYY |
| (G4S)11 | MDVWGKGTTVTVSSGGGGSGGGGSGGGGSDIQMTQSPSSVSASVGDRVTITCRAS |
| linker_CDA_ | QGISSWLAWYQQKPGKAPKLLLIYAASSLQSGVPSRFSGSGSGTDFTLTISSLQPED |
| HIS | FATYYCQQTNSFPYTFGGGTKVEIKGGGGSGGGGSGGGGSGGGGSGGGGSGGGG |
| | SGGGGSGGGGSGGGGSGGGGSGGGGSMAQKRPACTLKPECVQQLLVCSQEAKKS |
| | AYCPYSHFPVGAALLTQEGRIFKGCNIENACYPLGICAERTAIQKAVSEGYKDFRAI |
| | AIASDMQDDFISPCGACRQVMREFGTNWPVYMTKPDGTYIVMTVQELLPSSFGPE |
| | DLQKTQHHHHHH (SEQ ID NO: 65) |
| Ab58_HC_ | EVQLLESGGGLVQPGGSLRLSCAASGETFSNYAMSWVRQAPGKGLEWVSAISGSG |
| (G4S)3_LC_ | GSTYYADSVKGRFTISRDNSKNTLYLQMNSLRAEDTAVYYCAKGPPTYHTNYYY |
| (G4S)112 | MDVWGKGTTVTVSSGGGGSGGGGSGGGGSDIQMTQSPSSVSASVGDRVTITCRAS |
| linker_CDA_ | QGISSWLAWYQQKPGKAPKLLLIYAASSLQSGVPSRFSGSGSGTDFTLTISSLQPED |
| HIS | FATYYCQQTNSFPYTFGGGTKVEIKGGGGSGGGGSGGGGSGGGGSGGGGSGGGG |
| | SGGGGSGGGGSGGGGGGGGSGGGGSGGGGSMAQKRPACTLKPECVQQLLVCSQ |
| | EAKKSAYCPYSHFPVGAALLTQEGRIFKGCNIENACYPLGICAERTAIQKAVSEGY |
| | KDFRAIAIASDMQDDFISPCGACRQVMREFGTNWPVYMTKPDGTYIVMTVQELLP |
| | SSFGPEDLQKTQHHHHHH (SEQ ID NO: 66) |
| Ab61_HC_ | EVQLLESGGGLVQPGGSLRLSCAASGETESSYVMIWVRQAPGKGLEWVSSISGDSV |
| (G4S)3_LC_G4S | TTYYADSVKGRFTISRDNSKNTLYLQMNSLRAEDTAVYYCAKGPPTYHTNYYYM |
| linker_CDA_ | DVWGKGTTVTVSSGGGGSGGGGSGGGGSDIQMTQSPSSVSASVGDRVTITCRASQ |
| HIS | GISSWLAWYQQKPGKAPKLLIYAASSLQQSGVPSRFSGSGSGTDFTLTISSLQPEDF |
| | ATYYCQQTNSEPYTFGGGTKVEIKGGGGSMAQKRPACTLKPECVQQLLVCSQEAK |
| | KSAYCPYSHFPVGAALLTQEGRIFKGCNIENACYPLGICAERTAIQKAVSEGYKDFR |
| | AIAIASDMQDDFISPCGACRQVMREFGTNWPVYMTKPDGTYIVMTVQELLPSSFGP |
| | EDLQKTQHHHHHH (SEQ ID NO: 67) |
| Ab61_HC_ | EVQLLESGGGLVQPGGSLRLSCAASGETESSYVMIWVRQAPGKGLEWVSSISGDSV |
| (G4S)3_LC_ | TTYYADSVKGRFTISRDNSKNTLYLQMNSLRAEDTAVYYCAKGPPTYHTNYYYM |
| (G4S)3 | DVWGKGTTVTVSSGGGGGGGGSGGGGSDIQMTQSPSSVSASVGDRVTITCRASQ |
| linker_CDA_ | GISSWLAWYQQKPGKAPKLLIYAASSLQQSGVPSRFSGSGSGTDFTLTISSLQPEDF |
| HIS | ATYYCQQTNSEPYTFGGGTKVEIKGGGGSGGGGSGGGGSMAQKRPACTLKPECV |
| | QQLLVCSQEAKKSAYCPYSHFPVGAALLTQEGRIFKGCNIENACYPLGICAERTAIQ |
| | KAVSEGYKDFRAIAIASDMQDDFISPCGACRQVMREFGTNWPVYMTKPDGTYIVM |
| | TVQELLPSSFGPEDLQKTQHHHHHH (SEQ ID NO: 68) |
| Ab61_HC_ | EVQLLESGGGLVQPGGSLRLSCAASGETESSYVMIWVRQAPGKGLEWVSSISGDSV |
| (G4S)3_LC_ | TTYYADSVKGRFTISRDNSKNTLYLQMNSLRAEDTAVYYCAKGPPTYHTNYYYM |
| (G4S)4 | DVWGKGTTVTVSSGGGGSGGGGSGGGGSDIQMTQSPSSVSASVGDRVTITCRASQ |
| linker_CDA_ | GISSWLAWYQQKPGKAPKLLIYAASSLQQSGVPSRFSGSGSGTDFTLTISSLQPEDF |
| HIS | ATYYCQQTNSEPYTFGGGTKVEIKGGGGSGGGGSGGGGSGGGGSMAQKRPACTL |
| | KPECVQQLLVCSQEAKKSAYCPYSHFPVGAALLTQEGRIFKGCNIENACYPLGICA |
| | ERTAIQKAVSEGYKDFRAIAIASDMQDDFISPCGACRQVMREFGTNWPVYMTKPD |
| | GTYIVMTVQELLPSSFGPEDLQKTQHHHHHH (SEQ ID NO: 69) |
| Ab61_HC_ | EVQLLESGGGLVQPGGSLRLSCAASGETESSYVMIWVRQAPGKGLEWVSSISGDSV |
| (G4S)3_LC_ | TTYYADSVKGRFTISRDNSKNTLYLQMNSLRAEDTAVYYCAKGPPTYHTNYYYM |
| (G4S)5 | DVWGKGTTVTVSSGGGGSGGGGSGGGGSDIQMTQSPSSVSASVGDRVTITCRASQ |
| linker_CDA_ | GISSWLAWYQQKPGKAPKLLIYAASSLQQSGVPSRFSGSGSGTDFTLTISSLQPEDF |
| HIS | ATYYCQQTNSEPYTFGGGTKVEIKGGGGSGGGGSGGGGSGGGGSGGGGSMAQKR |
| | PACTLKPECVQQLLVCSQEAKKSAYCPYSHFPVGAALLTQEGRIFKGCNIENACYP |
| | LGICAERTAIQKAVSEGYKDFRAIAIASDMQDDFISPCGACRQVMREFGTNWPVY |
| | MTKPDGTYIVMTVQELLPSSFGPEDLQKTQHHHHHH (SEQ ID NO: 70) |
| Ab61_HC_ | EVQLLESGGGLVQPGGSLRLSCAASGETESSYVMIWVRQAPGKGLEWVSSISGDSV |
| (G4S)3_LC_ | TTYYADSVKGRFTISRDNSKNTLYLQMNSLRAEDTAVYYCAKGPPTYHTNYYYM |
| (G4S)6 | DVWGKGTTVTVSSGGGGSGGGGSGGGGSDIQMTQSPSSVSASVGDRVTITCRASQ |
| linker_CDA_ | GISSWLAWYQQKPGKAPKLLIYAASSLQQSGVPSRFSGSGSGTDFTLTISSLQPEDF |
| HIS | ATYYCQQTNSEPYTFGGGTKVEIKGGGGSGGGGSGGGGSGGGGSGGGGSGGGGS |
| | MAQKRPACTLKPECVQQLLVCSQEAKKSAYCPYSHFPVGAALLTQEGRIFKGCNIE |
| | NACYPLGICAERTAIQKAVSEGYKDFRAIAIASDMQDDFISPCGACRQVMREFGTN |
| | WPVYMTKPDGTYIVMTVQELLPSSFGPEDLQKTQHHHHHH (SEQ ID NO: 71) |
| Ab61_HC_ | EVQLLESGGGLVQPGGSLRLSCAASGETESSYVMIWVRQAPGKGLEWVSSISGDSV |
| (G4S)3_LC_ | TTYYADSVKGRFTISRDNSKNTLYLQMNSLRAEDTAVYYCAKGPPTYHTNYYYM |
| (G4S)7 | DVWGKGTTVTVSSGGGGSGGGGSGGGGSDIQMTQSPSSVSASVGDRVTITCRASQ |
| linker_CDA_ | GISSWLAWYQQKPGKAPKLLIYAASSLQQSGVPSRFSGSGSGTDFTLTISSLQPEDF |
| HIS | ATYYCQQTNSEPYTFGGGTKVEIKGGGGSGGGGSGGGGSGGGGSGGGGSGGGGS |
| | GGGGSMAQKRPACTLKPECVQQLLVCSQEAKKSAYCPYSHFPVGAALLTQEGRIF |
| | KGCNIENACYPLGICAERTAIQKAVSEGYKDFRAIAIASDMQDDFISPCGACRQVM |
| | REFGTNWPVYMTKPDGTYIVMTVQELLPSSFGPEDLQKTQHHHHHH (SEQ ID NO: |
| | 72) |
| Ab61_HC_ | EVQLLESGGGLVQPGGSLRLSCAASGETESSYVMIWVRQAPGKGLEWVSSISGDSV |
| (G4S)3_LC_ | TTYYADSVKGRFTISRDNSKNTLYLQMNSLRAEDTAVYYCAKGPPTYHTNYYYM |
| (G4S)8 | DVWGKGTTVTVSSGGGGGGGGSGGGGSDIQMTQSPSSVSASVGDRVTITCRASQ |
| linker_CDA_ | GISSWLAWYQQKPGKAPKLLIYAASSLQQSGVPSRFSGSGSGTDFTLTISSLQPEDF |
| HIS | ATYYCQQTNSEPYTFGGGTKVEIKGGGGSGGGGSGGGGSGGGGSGGGGSGGGGS |
| | GGGGSGGGGSMAQKRPACTLKPECVQQLLVCSQEAKKSAYCPYSHFPVGAALLT |
| | QEGRIFKGCNIENACYPLGICAERTAIQKAVSEGYKDFRAIAIASDMQDDFISPCGA |
| | CRQVMREFGTNWPVYMTKPDGTYIVMTVQELLPSSFGPEDLQKTQHHHHHH |
| | (SEQ ID NO: 73) |
| Ab61_HC_ | EVQLLESGGGLVQPGGSLRLSCAASGETESSYVMIWVRQAPGKGLEWVSSISGDSV |
| (G4S)3_LC_ | TTYYADSVKGRFTISRDNSKNTLYLQMNSLRAEDTAVYYCAKGPPTYHTNYYYM |
| (G4S)9 | DVWGKGTTVTVSSGGGGSGGGGSGGGGSDIQMTQSPSSVSASVGDRVTITCRASQ |
| linker_CDA_ | GISSWLAWYQQKPGKAPKLLIYAASSLQQSGVPSRFSGSGSGTDFTLTISSLQPEDF |
| HIS | ATYYCQQTNSEPYTFGGGTKVEIKGGGGSGGGGSGGGGSGGGGSGGGGSGGGGS |
| | GGGGSGGGGSGGGGSMAQKRPACTLKPECVQQLLVCSQEAKKSAYCPYSHFPVG |
| | AALLTQEGRIFKGCNIENACYPLGICAERTAIQKAVSEGYKDFRAIAIASDMQDDFI |
| | SPCGACRQVMREFGTNWPVYMTKPDGTYIVMTVQELLPSSFGPEDLQKTQHHHH |
| | HH (SEQ ID NO: 74) |
| Ab61_HC_ | EVQLLESGGGLVQPGGSLRLSCAASGETESSYVMIWVRQAPGKGLEWVSSISGDSV |
| (G4S)3_LC_ | TTYYADSVKGRFTISRDNSKNTLYLQMNSLRAEDTAVYYCAKGPPTYHTNYYYM |
| (G4S)10 | DVWGKGTTVTVSSGGGGSGGGGSGGGGSDIQMTQSPSSVSASVGDRVTITCRASQ |
| linker_CDA_ | GISSWLAWYQQKPGKAPKLLIYAASSLQQSGVPSRFSGSGSGTDFTLTISSLQPEDF |
| HIS | ATYYCQQTNSEPYTFGGGTKVEIKGGGGSGGGGSGGGGSGGGGSGGGGSGGGGS |
| | GGGGSGGGGGGGGSGGGGSMAQKRPACTLKPECVQQLLVCSQEAKKSAYCPYS |
| | HFPVGAALLTQEGRIFKGCNIENACYPLGICAERTAIQKAVSEGYKDFRAIAIASDM |
| | QDDFISPCGACRQVMREFGTNWPVYMTKPDGTYIVMTVQELLPSSFGPEDLQKTQ |
| | HHHHHH (SEQ ID NO: 75) |
| Ab61_HC_ | EVQLLESGGGLVQPGGSLRLSCAASGETESSYVMIWVRQAPGKGLEWVSSISGDSV |
| (G4S)3_LC_ | TTYYADSVKGRFTISRDNSKNTLYLQMNSLRAEDTAVYYCAKGPPTYHTNYYYM |
| (G4S)11 | DVWGKGTTVTVSSGGGGSGGGGSGGGGSDIQMTQSPSSVSASVGDRVTITCRASQ |
| linker_CDA_ | GISSWLAWYQQKPGKAPKLLIYAASSLQQSGVPSRFSGSGSGTDFTLTISSLQPEDF |
| HIS | ATYYCQQTNSEPYTFGGGTKVEIKGGGGSGGGGSGGGGSGGGGSGGGGSGGGGS |
| | GGGGSGGGGGGGGSGGGGSGGGGSMAQKRPACTLKPECVQQLLVCSQEAKKSA |
| | YCPYSHFPVGAALLTQEGRIFKGCNIENACYPLGICAERTAIQKAVSEGYKDFRAIA |
| | IASDMQDDFISPCGACRQVMREFGTNWPVYMTKPDGTYIVMTVQELLPSSFGPED |
| | LQKTQHHHHHH (SEQ ID NO: 76) |
| Ab61_HC_ | EVQLLESGGGLVQPGGSLRLSCAASGETESSYVMIWVRQAPGKGLEWVSSISGDSV |
| (G4S)3_LC_ | TTYYADSVKGRFTISRDNSKNTLYLQMNSLRAEDTAVYYCAKGPPTYHTNYYYM |
| (G4S)112 | DVWGKGTTVTVSSGGGGSGGGGSGGGGSDIQMTQSPSSVSASVGDRVTITCRASQ |
| linker_CDA_ | GISSWLAWYQQKPGKAPKLLIYAASSLQQSGVPSRFSGSGSGTDFTLTISSLQPEDF |
| HIS | ATYYCQQTNSEPYTFGGGTKVEIKGGGGSGGGGSGGGGSGGGGSGGGGSGGGGS |
| | GGGGSGGGGSGGGGSGGGGSGGGGSGGGGSMAQKRPACTLKPECVQQLLVCSQE |
| | AKKSAYCPYSHFPVGAALLTQEGRIFKGCNIENACYPLGICAERTAIQKAVSEGYK |
| | DFRAIAIASDMQDDFISPCGACRQVMREFGTNWPVYMTKPDGTYIVMTVQELLPSS |
| | FGPEDLQKTQHHHHHH (SEQ ID NO: 77) |
| Ab66_HC_ | EVQLVESGGGLVQPGGSLRLSCAASGETFSDHYMDWVRQAPGKGLASGETFSDH |
| (G4S)3_LC_G4S | YMDWVRQAPGKGLEWVGRIRNKASSYTTEYAASVKGRFTISRDDSKNSLYLQMN |
| linker_CDA_ | SLKTEDTAVYYCAREPKYWIDFDLWGRGTLVTVSSGGGGSGGGGSGGGGSDIQM |
| HIS | TQSPSSLSASVGDRVTITCRASQSISSYLNWYQQKPGKAPKLLIYAASSLQSGVPSR |
| | FSGSGSGTDFTLTISSLQPEDFATYYCQQSYIAPYTFGGGTKVEIKGGGGSMAQKRP |
| | ACTLKPECVQQLLVCSQEAKKSAYCPYSHFPVGAALLTQEGRIFKGCNIENACYPL |
| | GICAERTAIQKAVSEGYKDFRAIAIASDMQDDFISPCGACRQVMREFGTNWPVYM |
| | TKPDGTYIVMTVQELLPSSFGPEDLQKTQHHHHHH (SEQ ID NO: 78) |
| Ab66_HC_ | EVQLVESGGGLVQPGGSLRLSCAASGETFSDHYMDWVRQAPGKGLASGETFSDH |
| (G4S)3_LC_ | YMDWVRQAPGKGLEWVGRIRNKASSYTTEYAASVKGRFTISRDDSKNSLYLQMN |
| (G4S)3 | SLKTEDTAVYYCAREPKYWIDFDLWGRGTLVTVSSGGGGSGGGGSGGGGSDIQM |
| linker_CDA_ | TQSPSSLSASVGDRVTITCRASQSISSYLNWYQQKPGKAPKLLIYAASSLQSGVPSR |
| HIS | FSGSGSGTDFTLTISSLQPEDFATYYCQQSYIAPYTFGGGTKVEIKGGGGSGGGGSG |
| | GGGSMAQKRPACTLKPECVQQLLVCSQEAKKSAYCPYSHFPVGAALLTQEGRIFK |
| | GCNIENACYPLGICAERTAIQKAVSEGYKDFRAIAIASDMQDDFISPCGACRQVMR |
| | EFGTNWPVYMTKPDGTYIVMTVQELLPSSFGPEDLQKTQHHHHHH (SEQ ID NO: |
| | 79) |
| Ab66_HC_ | EVQLVESGGGLVQPGGSLRLSCAASGETFSDHYMDWVRQAPGKGLASGETFSDH |
| (G4S)3_LC_ | YMDWVRQAPGKGLEWVGRIRNKASSYTTEYAASVKGRFTISRDDSKNSLYLQMN |
| (G4S)4 | SLKTEDTAVYYCAREPKYWIDFDLWGRGTLVTVSSGGGGSGGGGSGGGGSDIQM |
| linker_CDA_ | TQSPSSLSASVGDRVTITCRASQSISSYLNWYQQKPGKAPKLLIYAASSLQSGVPSR |
| HIS | FSGSGSGTDFTLTISSLQPEDFATYYCQQSYIAPYTFGGGTKVEIKGGGGSGGGGSG |
| | GGGSGGGGSMAQKRPACTLKPECVQQLLVCSQEAKKSAYCPYSHFPVGAALLTQ |
| | EGRIFKGCNIENACYPLGICAERTAIQKAVSEGYKDFRAIAIASDMQDDFISPCGAC |
| | RQVMREFGTNWPVYMTKPDGTYIVMTVQELLPSSFGPEDLQKTQHHHHHH (SEQ |
| | ID NO: 80) |
| Ab66_HC_ | EVQLVESGGGLVQPGGSLRLSCAASGETFSDHYMDWVRQAPGKGLASGETFSDH |
| (G4S)3_LC_ | YMDWVRQAPGKGLEWVGRIRNKASSYTTEYAASVKGRFTISRDDSKNSLYLQMN |
| (G4S)5 | SLKTEDTAVYYCAREPKYWIDFDLWGRGTLVTVSSGGGGSGGGGSGGGGSDIQM |
| linker_CDA_ | TQSPSSLSASVGDRVTITCRASQSISSYLNWYQQKPGKAPKLLIYAASSLQSGVPSR |
| HIS | FSGSGSGTDFTLTISSLQPEDFATYYCQQSYIAPYTFGGGTKVEIKGGGGSGGGGSG |
| | GGGSGGGGSGGGGSMAQKRPACTLKPECVQQLLVCSQEAKKSAYCPYSHFPVGA |
| | ALLTQEGRIFKGCNIENACYPLGICAERTAIQKAVSEGYKDFRAIAIASDMQDDFISP |
| | CGACRQVMREFGTNWPVYMTKPDGTYIVMTVQELLPSSFGPEDLQKTQHHHHHH |
| | (SEQ ID NO: 81) |
| Ab66_HC_ | EVQLVESGGGLVQPGGSLRLSCAASGETFSDHYMDWVRQAPGKGLASGETFSDH |
| (G4S)3_LC_ | YMDWVRQAPGKGLEWVGRIRNKASSYTTEYAASVKGRFTISRDDSKNSLYLQMN |
| (G4S)6 | SLKTEDTAVYYCAREPKYWIDFDLWGRGTLVTVSSGGGGSGGGGSGGGGSDIQM |
| linker_CDA_ | TQSPSSLSASVGDRVTITCRASQSISSYLNWYQQKPGKAPKLLIYAASSLQSGVPSR |
| HIS | FSGSGSGTDFTLTISSLQPEDFATYYCQQSYIAPYTFGGGTKVEIKGGGGGGGGSG |
| | GGGSGGGGGGGGSGGGGSMAQKRPACTLKPECVQQLLVCSQEAKKSAYCPYSH |
| | FPVGAALLTQEGRIFKGCNIENACYPLGICAERTAIQKAVSEGYKDFRAIAIASDMQ |
| | DDFISPCGACRQVMREFGTNWPVYMTKPDGTYIVMTVQELLPSSFGPEDLQKTQH |
| | HHHHH (SEQ ID NO: 82) |
| Ab66_HC_ | EVQLVESGGGLVQPGGSLRLSCAASGETFSDHYMDWVRQAPGKGLASGETFSDH |
| (G4S)3_LC_ | YMDWVRQAPGKGLEWVGRIRNKASSYTTEYAASVKGRFTISRDDSKNSLYLQMN |
| (G4S)7 | SLKTEDTAVYYCAREPKYWIDFDLWGRGTLVTVSSGGGGSGGGGSGGGGSDIQM |
| linker_CDA_ | TQSPSSLSASVGDRVTITCRASQSISSYLNWYQQKPGKAPKLLIYAASSLQSGVPSR |
| HIS | FSGSGSGTDFTLTISSLQPEDFATYYCQQSYIAPYTFGGGTKVEIKGGGGSGGGGSG |
| | GGGSGGGGSGGGGSGGGGSGGGGSMAQKRPACTLKPECVQQLLVCSQEAKKSAY |
| | CPYSHFPVGAALLTQEGRIFKGCNIENACYPLGICAERTAIQKAVSEGYKDFRAIAI |
| | ASDMQDDFISPCGACRQVMREFGTNWPVYMTKPDGTYIVMTVQELLPSSFGPEDL |
| | QKTQHHHHHH (SEQ ID NO: 83) |
| Ab66_HC_ | EVQLVESGGGLVQPGGSLRLSCAASGETFSDHYMDWVRQAPGKGLASGETFSDH |
| (G4S)3_LC_ | YMDWVRQAPGKGLEWVGRIRNKASSYTTEYAASVKGRFTISRDDSKNSLYLQMN |
| (G4S)8 | SLKTEDTAVYYCAREPKYWIDFDLWGRGTLVTVSSGGGGSGGGGSGGGGSDIQM |
| linker_CDA_ | TQSPSSLSASVGDRVTITCRASQSISSYLNWYQQKPGKAPKLLIYAASSLQSGVPSR |
| HIS | FSGSGSGTDFTLTISSLQPEDFATYYCQQSYIAPYTFGGGTKVEIKGGGGSGGGGSG |
| | GGGSGGGGSGGGGSGGGGSGGGGSGGGGSMAQKRPACTLKPECVQQLLVCSQEA |
| | KKSAYCPYSHFPVGAALLTQEGRIFKGCNIENACYPLGICAERTAIQKAVSEGYKDF |
| | RAIAIASDMQDDFISPCGACRQVMREFGTNWPVYMTKPDGTYIVMTVQELLPSSFG |
| | PEDLQKTQHHHHHH (SEQ ID NO: 84) |
| Ab66_HC_ | EVQLVESGGGLVQPGGSLRLSCAASGETFSDHYMDWVRQAPGKGLASGETFSDH |
| (G4S)3_LC_ | YMDWVRQAPGKGLEWVGRIRNKASSYTTEYAASVKGRFTISRDDSKNSLYLQMN |
| (G4S)9 | SLKTEDTAVYYCAREPKYWIDFDLWGRGTLVTVSSGGGGSGGGGSGGGGSDIQM |
| linker_CDA_ | TQSPSSLSASVGDRVTITCRASQSISSYLNWYQQKPGKAPKLLIYAASSLQSGVPSR |
| HIS | FSGSGSGTDFTLTISSLQPEDFATYYCQQSYIAPYTFGGGTKVEIKGGGGSGGGGSG |
| | GGGSGGGGSGGGGSGGGGSGGGGSGGGGSGGGGSMAQKRPACTLKPECVQQLL |
| | VCSQEAKKSAYCPYSHFPVGAALLTQEGRIFKGCNIENACYPLGICAERTAIQKAVS |
| | EGYKDFRAIAIASDMQDDFISPCGACRQVMREFGTNWPVYMTKPDGTYIVMTVQE |
| | LLPSSFGPEDLQKTQHHHHHH (SEQ ID NO: 85) |
| Ab66_HC_ | EVQLVESGGGLVQPGGSLRLSCAASGETFSDHYMDWVRQAPGKGLASGETFSDH |
| (G4S)3_LC_ | YMDWVRQAPGKGLEWVGRIRNKASSYTTEYAASVKGRFTISRDDSKNSLYLQMN |
| (G4S)10 | SLKTEDTAVYYCAREPKYWIDFDLWGRGTLVTVSSGGGGSGGGGSGGGGSDIQM |
| linker_CDA_ | TQSPSSLSASVGDRVTITCRASQSISSYLNWYQQKPGKAPKLLIYAASSLQSGVPSR |
| HIS | FSGSGSGTDFTLTISSLQPEDFATYYCQQSYIAPYTFGGGTKVEIKGGGGSGGGGSG |
| | GGGSGGGGSGGGGSGGGGSGGGGSGGGGSGGGGSGGGGSMAQKRPACTLKPEC |
| | VQQLLVCSQEAKKSAYCPYSHFPVGAALLTQEGRIFKGCNIENACYPLGICAERTAI |
| | QKAVSEGYKDFRAIAIASDMQDDFISPCGACRQVMREFGTNWPVYMTKPDGTYIV |
| | MTVQELLPSSFGPEDLQKTQHHHHHH (SEQ ID NO: 86) |
| Ab66_HC_ | EVQLVESGGGLVQPGGSLRLSCAASGETFSDHYMDWVRQAPGKGLASGETFSDH |
| (G4S)3_LC_ | YMDWVRQAPGKGLEWVGRIRNKASSYTTEYAASVKGRFTISRDDSKNSLYLQMN |
| (G4S)11 | SLKTEDTAVYYCAREPKYWIDFDLWGRGTLVTVSSGGGGSGGGGSGGGGSDIQM |
| linker_CDA_ | TQSPSSLSASVGDRVTITCRASQSISSYLNWYQQKPGKAPKLLIYAASSLQSGVPSR |
| HIS | FSGSGSGTDFTLTISSLQPEDFATYYCQQSYIAPYTFGGGTKVEIKGGGGSGGGGSG |
| | GGGSGGGGSGGGGSGGGGSGGGGSGGGGSGGGGSGGGGSGGGGSMAQKRPACT |
| | LKPECVQQLLVCSQEAKKSAYCPYSHFPVGAALLTQEGRIFKGCNIENACYPLGIC |
| | AERTAIQKAVSEGYKDFRAIAIASDMQDDFISPCGACRQVMREFGTNWPVYMTKP |
| | DGTYIVMTVQELLPSSFGPEDLQKTQHHHHHH (SEQ ID NO: 87) |
| Ab66_HC_ | EVQLVESGGGLVQPGGSLRLSCAASGETFSDHYMDWVRQAPGKGLASGETFSDH |
| (G4S)3_LC_ | YMDWVRQAPGKGLEWVGRIRNKASSYTTEYAASVKGRFTISRDDSKNSLYLQMN |
| (G4S)112 | SLKTEDTAVYYCAREPKYWIDFDLWGRGTLVTVSSGGGGSGGGGSGGGGSDIQM |
| linker_CDA_ | TQSPSSLSASVGDRVTITCRASQSISSYLNWYQQKPGKAPKLLIYAASSLQSGVPSR |
| HIS | FSGSGSGTDFTLTISSLQPEDFATYYCQQSYIAPYTFGGGTKVEIKGGGGSGGGGSG |
| | GGGSGGGGSGGGGSGGGGSGGGGSGGGGSGGGGSGGGGSGGGGSGGGGSMAQK |
| | RPACTLKPECVQQLLVCSQEAKKSAYCPYSHFPVGAALLTQEGRIFKGCNIENACY |
| | PLGICAERTAIQKAVSEGYKDFRAIAIASDMQDDFISPCGACRQVMREFGTNWPVY |
| | MTKPDGTYIVMTVQELLPSSFGPEDLQKTQHHHHHH (SEQ ID NO: 88) |
| Ab68_HC_ | EVQLVESGGGLVQPGRSLRLSCTASGFTFSDHDMNWVRQAPGKGLEWVGRTRNA |
| (G4S)3_LC_G4S | AGSYTTEYAASVKGRFTISRDDSKNSLYLQMNSLKTEDTAVYYCAREPKYWIDFD |
| linker_CDA_ | LWGRGTLVTSSGGGGSGGGGSGGGGSDIQMTQSPSSLSASVGDRVTITCRASQSISS |
| HIS | YLNWYQQKPGKAPKLLIYAASSLQSGVPSRFSGSGSGTDFTLTISSLQPEDFATYYC |
| | QQSYIAPYTFGGGTKVEIKGGGGSMAQKRPACTLKPECVQQLLVCSQEAKKSAYC |
| | PYSHFPVGAALLTQEGRIFKGCNIENACYPLGICAERTAIQKAVSEGYKDFRAIAIAS |
| | DMQDDFISPCGACRQVMREFGTNWPVYMTKPDGTYIVMTVQELLPSSFGPEDLQK |
| | TQHHHHHH (SEQ ID NO: 89) |
| Ab68_HC_ | EVQLVESGGGLVQPGRSLRLSCTASGFTFSDHDMNWVRQAPGKGLEWVGRTRNA |
| (G4S)3_LC_ | AGSYTTEYAASVKGRFTISRDDSKNSLYLQMNSLKTEDTAVYYCAREPKYWIDFD |
| (G4S)3 | LWGRGTLVTSSGGGGSGGGGSGGGGSDIQMTQSPSSLSASVGDRVTITCRASQSISS |
| linker_CDA_ | YLNWYQQKPGKAPKLLIYAASSLQSGVPSRFSGSGSGTDFTLTISSLQPEDFATYYC |
| HIS | QQSYIAPYTFGGGTKVEIKGGGGSGGGGSGGGGSMAQKRPACTLKPECVQQLLVC |
| | SQEAKKSAYCPYSHFPVGAALLTQEGRIFKGCNIENACYPLGICAERTAIQKAVSEG |
| | YKDFRAIAIASDMQDDFISPCGACRQVMREFGTNWPVYMTKPDGTYIVMTVQELL |
| | PSSFGPEDLQKTQHHHHHH (SEQ ID NO: 90) |
| Ab68_HC_ | EVQLVESGGGLVQPGRSLRLSCTASGFTFSDHDMNWVRQAPGKGLEWVGRTRNA |
| (G4S)3_LC_ | AGSYTTEYAASVKGRFTISRDDSKNSLYLQMNSLKTEDTAVYYCAREPKYWIDFD |
| (G4S)4 | LWGRGTLVTSSGGGGSGGGGSGGGGSDIQMTQSPSSLSASVGDRVTITCRASQSISS |
| linker_CDA_ | YLNWYQQKPGKAPKLLIYAASSLQSGVPSRFSGSGSGTDFTLTISSLQPEDFATYYC |
| HIS | QQSYIAPYTFGGGTKVEIKGGGGSGGGGSGGGGSGGGGSMAQKRPACTLKPECVQ |
| | QLLVCSQEAKKSAYCPYSHFPVGAALLTQEGRIFKGCNIENACYPLGICAERTAIQK |
| | AVSEGYKDFRAIAIASDMQDDFISPCGACRQVMREFGTNWPVYMTKPDGTYIVMT |
| | VQELLPSSFGPEDLQKTQHHHHHH (SEQ ID NO: 91) |
| Ab68_HC_ | EVQLVESGGGLVQPGRSLRLSCTASGFTFSDHDMNWVRQAPGKGLEWVGRTRNA |
| (G4S)3_LC_ | AGSYTTEYAASVKGRFTISRDDSKNSLYLQMNSLKTEDTAVYYCAREPKYWIDFD |
| (G4S)5 | LWGRGTLVTSSGGGGSGGGGSGGGGSDIQMTQSPSSLSASVGDRVTITCRASQSISS |
| linker_CDA_ | YLNWYQQKPGKAPKLLIYAASSLQSGVPSRFSGSGSGTDFTLTISSLQPEDFATYYC |
| HIS | QQSYIAPYTFGGGTKVEIKGGGGSGGGGSGGGGSGGGGSGGGGSMAQKRPACTL |
| | KPECVQQLLVCSQEAKKSAYCPYSHFPVGAALLTQEGRIFKGCNIENACYPLGICA |
| | ERTAIQKAVSEGYKDFRAIAIASDMQDDFISPCGACRQVMREFGTNWPVYMTKPD |
| | GTYIVMTVQELLPSSFGPEDLQKTQHHHHHH (SEQ ID NO: 92) |
| Ab68_HC_ | EVQLVESGGGLVQPGRSLRLSCTASGFTFSDHDMNWVRQAPGKGLEWVGRTRNA |
| (G4S)3_LC_ | AGSYTTEYAASVKGRFTISRDDSKNSLYLQMNSLKTEDTAVYYCAREPKYWIDFD |
| (G4S)6 | LWGRGTLVTSSGGGGGGGGSGGGGSDIQMTQSPSSLSASVGDRVTITCRASQSISS |
| linker_CDA_ | YLNWYQQKPGKAPKLLIYAASSLQSGVPSRFSGSGSGTDFTLTISSLQPEDFATYYC |
| HIS | QQSYIAPYTFGGGTKVEIKGGGGGGGGSGGGGSGGGGSGGGGSGGGGSMAQKR |
| | PACTLKPECVQQLLVCSQEAKKSAYCPYSHFPVGAALLTQEGRIFKGCNIENACYP |
| | LGICAERTAIQKAVSEGYKDFRAIAIASDMQDDFISPCGACRQVMREFGTNWPVY |
| | MTKPDGTYIVMTVQELLPSSFGPEDLQKTQHHHHHH (SEQ ID NO: 93) |
| Ab68_HC_ | EVQLVESGGGLVQPGRSLRLSCTASGFTFSDHDMNWVRQAPGKGLEWVGRTRNA |
| (G4S)3_LC_ | AGSYTTEYAASVKGRFTISRDDSKNSLYLQMNSLKTEDTAVYYCAREPKYWIDFD |
| (G4S)7 | LWGRGTLVTSSGGGGSGGGGSGGGGSDIQMTQSPSSLSASVGDRVTITCRASQSISS |
| linker_CDA_ | YLNWYQQKPGKAPKLLIYAASSLQSGVPSRFSGSGSGTDFTLTISSLQPEDFATYYC |
| HIS | QQSYIAPYTFGGGTKVEIKGGGGSGGGGSGGGGSGGGGSGGGGSGGGGSGGGGS |
| | MAQKRPACTLKPECVQQLLVCSQEAKKSAYCPYSHFPVGAALLTQEGRIFKGCNIE |
| | NACYPLGICAERTAIQKAVSEGYKDFRAIAIASDMQDDFISPCGACRQVMREFGTN |
| | WPVYMTKPDGTYIVMTVQELLPSSFGPEDLQKTQHHHHHH (SEQ ID NO: 94) |
| Ab68_HC_ | EVQLVESGGGLVQPGRSLRLSCTASGFTFSDHDMNWVRQAPGKGLEWVGRTRNA |
| (G4S)3_LC_ | AGSYTTEYAASVKGRFTISRDDSKNSLYLQMNSLKTEDTAVYYCAREPKYWIDFD |
| (G4S)8 | LWGRGTLVTSSGGGGSGGGGSGGGGSDIQMTQSPSSLSASVGDRVTITCRASQSISS |
| linker_CDA_ | YLNWYQQKPGKAPKLLIYAASSLQSGVPSRFSGSGSGTDFTLTISSLQPEDFATYYC |
| HIS | QQSYIAPYTFGGGTKVEIKGGGGSGGGGSGGGGSGGGGSGGGGSGGGGSGGGGS |
| | GGGGSMAQKRPACTLKPECVQQLLVCSQEAKKSAYCPYSHFPVGAALLTQEGRIF |
| | KGCNIENACYPLGICAERTAIQKAVSEGYKDFRAIAIASDMQDDFISPCGACRQVM |
| | REFGTNWPVYMTKPDGTYIVMTVQELLPSSFGPEDLQKTQHHHHHH (SEQ ID NO: |
| | 95) |
| Ab68_HC_ | EVQLVESGGGLVQPGRSLRLSCTASGFTFSDHDMNWVRQAPGKGLEWVGRTRNA |
| (G4S)3_LC_ | AGSYTTEYAASVKGRFTISRDDSKNSLYLQMNSLKTEDTAVYYCAREPKYWIDFD |
| (G4S)9 | LWGRGTLVTSSGGGGSGGGGSGGGGSDIQMTQSPSSLSASVGDRVTITCRASQSISS |
| linker_CDA_ | YLNWYQQKPGKAPKLLIYAASSLQSGVPSRFSGSGSGTDFTLTISSLQPEDFATYYC |
| HIS | QQSYIAPYTFGGGTKVEIKGGGGSGGGGSGGGGSGGGGSGGGGSGGGGSGGGGS |
| | GGGGSGGGGSMAQKRPACTLKPECVQQLLVCSQEAKKSAYCPYSHFPVGAALLT |
| | QEGRIFKGCNIENACYPLGICAERTAIQKAVSEGYKDFRAIAIASDMQDDFISPCGA |
| | CRQVMREFGTNWPVYMTKPDGTYIVMTVQELLPSSFGPEDLQKTQHHHHHH |
| | (SEQ ID NO: 96) |
| Ab68_HC_ | EVQLVESGGGLVQPGRSLRLSCTASGFTFSDHDMNWVRQAPGKGLEWVGRTRNA |
| (G4S)3_LC_ | AGSYTTEYAASVKGRFTISRDDSKNSLYLQMNSLKTEDTAVYYCAREPKYWIDFD |
| (G4S)10 | LWGRGTLVTSSGGGGSGGGGSGGGGSDIQMTQSPSSLSASVGDRVTITCRASQSISS |
| linker_CDA_ | YLNWYQQKPGKAPKLLIYAASSLQSGVPSRFSGSGSGTDFTLTISSLQPEDFATYYC |
| HIS | QQSYIAPYTFGGGTKVEIKGGGGSGGGGSGGGGSGGGGSGGGGSGGGGSGGGGS |
| | GGGGSGGGGSGGGGSMAQKRPACTLKPECVQQLLVCSQEAKKSAYCPYSHFPVG |
| | AALLTQEGRIFKGCNIENACYPLGICAERTAIQKAVSEGYKDFRAIAIASDMQDDFI |
| | SPCGACRQVMREFGTNWPVYMTKPDGTYIVMTVQELLPSSFGPEDLQKTQHHHH |
| | HH (SEQ ID NO: 97) |
| Ab68_HC_ | EVQLVESGGGLVQPGRSLRLSCTASGFTFSDHDMNWVRQAPGKGLEWVGRTRNA |
| (G4S)3_LC_ | AGSYTTEYAASVKGRFTISRDDSKNSLYLQMNSLKTEDTAVYYCAREPKYWIDFD |
| (G4S)11 | LWGRGTLVTSSGGGGSGGGGSGGGGSDIQMTQSPSSLSASVGDRVTITCRASQSISS |
| linker_CDA_ | YLNWYQQKPGKAPKLLIYAASSLQSGVPSRFSGSGSGTDFTLTISSLQPEDFATYYC |
| HIS | QQSYIAPYTFGGGTKVEIKGGGGSGGGGSGGGGSGGGGSGGGGSGGGGSGGGGS |
| | GGGGSGGGGSGGGGSGGGGSMAQKRPACTLKPECVQQLLVCSQEAKKSAYCPYS |
| | HFPVGAALLTQEGRIFKGCNIENACYPLGICAERTAIQKAVSEGYKDFRAIAIASDM |
| | QDDFISPCGACRQVMREFGTNWPVYMTKPDGTYIVMTVQELLPSSFGPEDLQKTQ |
| | HHHHHH (SEQ ID NO: 98) |
| Ab68_HC_ | EVQLVESGGGLVQPGRSLRLSCTASGFTFSDHDMNWVRQAPGKGLEWVGRTRNA |
| (G4S)3_LC_ | AGSYTTEYAASVKGRFTISRDDSKNSLYLQMNSLKTEDTAVYYCAREPKYWIDFD |
| (G4S)112 | LWGRGTLVTSSGGGGSGGGGSGGGGSDIQMTQSPSSLSASVGDRVTITCRASQSISS |
| linker_CDA_ | YLNWYQQKPGKAPKLLIYAASSLQSGVPSRFSGSGSGTDFTLTISSLQPEDFATYYC |
| HIS | QQSYIAPYTFGGGTKVEIKGGGGSGGGGSGGGGSGGGGSGGGGSGGGGGGGGS |
| | GGGGSGGGGSGGGGSGGGGSGGGGSMAQKRPACTLKPECVQQLLVCSQEAKKSA |
| | YCPYSHFPVGAALLTQEGRIFKGCNIENACYPLGICAERTAIQKAVSEGYKDFRAIA |
| | IASDMQDDFISPCGACRQVMREFGTNWPVYMTKPDGTYIVMTVQELLPSSFGPED |
| | LQKTQHHHHHH (SEQ ID NO: 99) |
| Ab69_HC_ | DIQMTQSPSSLSASVGDRVTITCRASQSISSYLNWYQQKPGKAPKLLIYAASSLQSG |
| (G4S)3_LC_G4S | VPSRFSGSGSGTDFTLTISSLQPEDFATYYCQQSYIAPYIFGGGTKVEIKGGGGSGGG |
| linker_CDA_ | GSGGGGSEVQLVESGGGLVQPGGSLRLSCAASGETFVDHDMDWVRQAPGKGLE |
| HIS | WVGRTRNKLGSYTTEYAASVKGRETGRDDSKNSLYLQMNSLKTEDTAVYYCARE |
| | PKYWIDFDLWGRGTLVTVSSGGGGSMAQKRPACTLKPECVQQLLVCSQEAKKSA |
| | YCPYSHFPVGAALLTQEGRIFKGCNIENACYPLGICAERTAIQKAVSEGYKDFRAIA |
| | IASDMQDDFISPCGACRQVMREFGTNWPVYMTKPDGTYIVMTVQELLPSSFGPED |
| | LQKTQHHHHHH (SEQ ID NO: 100) |
| Ab69_HC_ | DIQMTQSPSSLSASVGDRVTITCRASQSISSYLNWYQQKPGKAPKLLIYAASSLQSG |
| (G4S)3_LC_ | VPSRFSGSGSGTDFTLTISSLQPEDFATYYCQQSYIAPYIFGGGTKVEIKGGGGSGGG |
| (G4S)3 | GSGGGGSEVQLVESGGGLVQPGGSLRLSCAASGETFVDHDMDWVRQAPGKGLE |
| linker_CDA_ | WVGRTRNKLGSYTTEYAASVKGRETGRDDSKNSLYLQMNSLKTEDTAVYYCARE |
| HIS | PKYWIDFDLWGRGTLVTVSSGGGGSGGGGSGGGGSMAQKRPACTLKPECVQQLL |
| | VCSQEAKKSAYCPYSHFPVGAALLTQEGRIFKGCNIENACYPLGICAERTAIQKAVS |
| | EGYKDFRAIAIASDMQDDFISPCGACRQVMREFGTNWPVYMTKPDGTYIVMTVQE |
| | LLPSSFGPEDLQKTQHHHHHH (SEQ ID NO: 101) |
| Ab69_HC_ | DIQMTQSPSSLSASVGDRVTITCRASQSISSYLNWYQQKPGKAPKLLIYAASSLQSG |
| (G4S)3_LC_ | VPSRFSGSGSGTDFTLTISSLQPEDFATYYCQQSYIAPYIFGGGTKVEIKGGGGSGGG |
| (G4S)4 | GSGGGGSEVQLVESGGGLVQPGGSLRLSCAASGETFVDHDMDWVRQAPGKGLE |
| linker_CDA_ | WVGRTRNKLGSYTTEYAASVKGRETGRDDSKNSLYLQMNSLKTEDTAVYYCARE |
| HIS | PKYWIDFDLWGRGTLVTVSSGGGGSGGGGSGGGGSGGGGSMAQKRPACTLKPEC |
| | VQQLLVCSQEAKKSAYCPYSHFPVGAALLTQEGRIFKGCNIENACYPLGICAERTAI |
| | QKAVSEGYKDFRAIAIASDMQDDFISPCGACRQVMREFGTNWPVYMTKPDGTYIV |
| | MTVQELLPSSFGPEDLQKTQHHHHHH (SEQ ID NO: 102) |
| Ab69_HC_ | DIQMTQSPSSLSASVGDRVTITCRASQSISSYLNWYQQKPGKAPKLLIYAASSLQSG |
| (G4S)3_LC_ | VPSRFSGSGSGTDFTLTISSLQPEDFATYYCQQSYIAPYIFGGGTKVEIKGGGGSGGG |
| (G4S)5 | GSGGGGSEVQLVESGGGLVQPGGSLRLSCAASGETFVDHDMDWVRQAPGKGLE |
| linker_CDA_ | WVGRTRNKLGSYTTEYAASVKGRETGRDDSKNSLYLQMNSLKTEDTAVYYCARE |
| HIS | PKYWIDFDLWGRGTLVTVSSGGGGSGGGGSGGGGSGGGGSGGGGSMAQKRPAC |
| | TLKPECVQQLLVCSQEAKKSAYCPYSHFPVGAALLTQEGRIFKGCNIENACYPLGIC |
| | AERTAIQKAVSEGYKDFRAIAIASDMQDDFISPCGACRQVMREFGTNWPVYMTKP |
| | DGTYIVMTVQELLPSSFGPEDLQKTQHHHHHH (SEQ ID NO: 103) |
| Ab69_HC_ | DIQMTQSPSSLSASVGDRVTITCRASQSISSYLNWYQQKPGKAPKLLIYAASSLQSG |
| (G4S)3_LC_ | VPSRFSGSGSGTDFTLTISSLQPEDFATYYCQQSYIAPYIFGGGTKVEIKGGGGSGGG |
| (G4S)6 | GSGGGGSEVQLVESGGGLVQPGGSLRLSCAASGETFVDHDMDWVRQAPGKGLE |
| linker_CDA_ | WVGRTRNKLGSYTTEYAASVKGRETGRDDSKNSLYLQMNSLKTEDTAVYYCARE |
| HIS | PKYWIDFDLWGRGTLVTVSSGGGGSGGGGSGGGGSGGGGSGGGGSGGGGSMAQ |
| | KRPACTLKPECVQQLLVCSQEAKKSAYCPYSHFPVGAALLTQEGRIFKGCNIENAC |
| | YPLGICAERTAIQKAVSEGYKDFRAIAIASDMQDDFISPCGACRQVMREFGTNWPV |
| | YMTKPDGTYIVMTVQELLPSSFGPEDLQKTQHHHHHH (SEQ ID NO: 104) |
| Ab69_HC_ | DIQMTQSPSSLSASVGDRVTITCRASQSISSYLNWYQQKPGKAPKLLIYAASSLQSG |
| (G4S)3_LC_ | VPSRFSGSGSGTDFTLTISSLQPEDFATYYCQQSYIAPYIFGGGTKVEIKGGGGSGGG |
| (G4S)7 | GSGGGGSEVQLVESGGGLVQPGGSLRLSCAASGETFVDHDMDWVRQAPGKGLE |
| linker_CDA_ | WVGRTRNKLGSYTTEYAASVKGRETGRDDSKNSLYLQMNSLKTEDTAVYYCARE |
| HIS | PKYWIDFDLWGRGTLVTVSSGGGGSGGGGSGGGGSGGGGSGGGGSGGGGSGGG |
| | GSMAQKRPACTLKPECVQQLLVCSQEAKKSAYCPYSHFPVGAALLTQEGRIFKGC |
| | NIENACYPLGICAERTAIQKAVSEGYKDFRAIAIASDMQDDFISPCGACRQVMREFG |
| | TNWPVYMTKPDGTYIVMTVQELLPSSFGPEDLQKTQHHHHHH (SEQ ID NO: 105) |
| Ab69_HC_ | DIQMTQSPSSLSASVGDRVTITCRASQSISSYLNWYQQKPGKAPKLLIYAASSLQSG |
| (G4S)3_LC_ | VPSRFSGSGSGTDFTLTISSLQPEDFATYYCQQSYIAPYIFGGGTKVEIKGGGGSGGG |
| (G4S)8 | GSGGGGSEVQLVESGGGLVQPGGSLRLSCAASGETFVDHDMDWVRQAPGKGLE |
| linker_CDA_ | WVGRTRNKLGSYTTEYAASVKGRETGRDDSKNSLYLQMNSLKTEDTAVYYCARE |
| HIS | PKYWIDFDLWGRGTLVTVSSGGGGSGGGGSGGGGSGGGGSGGGGSGGGGSGGG |
| | GSGGGGSMAQKRPACTLKPECVQQLLVCSQEAKKSAYCPYSHFPVGAALLTQEGR |
| | IFKGCNIENACYPLGICAERTAIQKAVSEGYKDFRAIAIASDMQDDFISPCGACRQV |
| | MREFGTNWPVYMTKPDGTYIVMTVQELLPSSFGPEDLQKTQHHHHHH (SEQ ID |
| | NO: 106) |
| Ab69_HC_ | DIQMTQSPSSLSASVGDRVTITCRASQSISSYLNWYQQKPGKAPKLLIYAASSLQSG |
| (G4S)3_LC_ | VPSRFSGSGSGTDFTLTISSLQPEDFATYYCQQSYIAPYIFGGGTKVEIKGGGGSGGG |
| (G4S)9 | GSGGGGSEVQLVESGGGLVQPGGSLRLSCAASGETFVDHDMDWVRQAPGKGLE |
| linker_CDA_ | WVGRTRNKLGSYTTEYAASVKGRETGRDDSKNSLYLQMNSLKTEDTAVYYCARE |
| HIS | PKYWIDFDLWGRGTLVTVSSGGGGSGGGGSGGGGSGGGGSGGGGSGGGGSGGG |
| | GSGGGGSGGGGSMAQKRPACTLKPECVQQLLVCSQEAKKSAYCPYSHFPVGAAL |
| | LTQEGRIFKGCNIENACYPLGICAERTAIQKAVSEGYKDFRAIAIASDMQDDFISPCG |
| | ACRQVMREFGTNWPVYMTKPDGTYIVMTVQELLPSSFGPEDLQKTQHHHHHH |
| | (SEQ ID NO: 107) |
| Ab69_HC_ | DIQMTQSPSSLSASVGDRVTITCRASQSISSYLNWYQQKPGKAPKLLIYAASSLQSG |
| (G4S)3_LC_ | VPSRFSGSGSGTDFTLTISSLQPEDFATYYCQQSYIAPYIFGGGTKVEIKGGGGSGGG |
| (G4S)10 | GSGGGGSEVQLVESGGGLVQPGGSLRLSCAASGETFVDHDMDWVRQAPGKGLE |
| linker_CDA_ | WVGRTRNKLGSYTTEYAASVKGRETGRDDSKNSLYLQMNSLKTEDTAVYYCARE |
| HIS | PKYWIDFDLWGRGTLVTVSSGGGGSGGGGSGGGGSGGGGSGGGGSGGGGSGGG |
| | GSGGGGSGGGGSGGGGSMAQKRPACTLKPECVQQLLVCSQEAKKSAYCPYSHFP |
| | VGAALLTQEGRIFKGCNIENACYPLGICAERTAIQKAVSEGYKDFRAIAIASDMQD |
| | DFISPCGACRQVMREFGTNWPVYMTKPDGTYIVMTVQELLPSSFGPEDLQKTQHH |
| | HHHH (SEQ ID NO: 108) |
| Ab69_HC_ | DIQMTQSPSSLSASVGDRVTITCRASQSISSYLNWYQQKPGKAPKLLIYAASSLQSG |
| (G4S)3_LC_ | VPSRFSGSGSGTDFTLTISSLQPEDFATYYCQQSYIAPYIFGGGTKVEIKGGGGSGGG |
| (G4S)11 | GSGGGGSEVQLVESGGGLVQPGGSLRLSCAASGETFVDHDMDWVRQAPGKGLE |
| linker_CDA_ | WVGRTRNKLGSYTTEYAASVKGRETGRDDSKNSLYLQMNSLKTEDTAVYYCARE |
| HIS | PKYWIDFDLWGRGTLVTVSSGGGGSGGGGSGGGGSGGGGSGGGGSGGGGSGGG |
| | GSGGGGSGGGGSGGGGSGGGGSMAQKRPACTLKPECVQQLLVCSQEAKKSAYCP |
| | YSHFPVGAALLTQEGRIFKGCNIENACYPLGICAERTAIQKAVSEGYKDFRAIAIAS |
| | DMQDDFISPCGACRQVMREFGTNWPVYMTKPDGTYIVMTVQELLPSSFGPEDLQK |
| | TQHHHHHH (SEQ ID NO: 109) |
| Ab69_HC_ | DIQMTQSPSSLSASVGDRVTITCRASQSISSYLNWYQQKPGKAPKLLIYAASSLQSG |
| (G4S)3_LC_ | VPSRFSGSGSGTDFTLTISSLQPEDFATYYCQQSYIAPYIFGGGTKVEIKGGGGSGGG |
| (G4S)112 | GSGGGGSEVQLVESGGGLVQPGGSLRLSCAASGETFVDHDMDWVRQAPGKGLE |
| linker_CDA_ | WVGRTRNKLGSYTTEYAASVKGRETGRDDSKNSLYLQMNSLKTEDTAVYYCARE |
| HIS | PKYWIDFDLWGRGTLVTVSSGGGGSGGGGSGGGGSGGGGSGGGGSGGGGSGGG |
| | GSGGGGSGGGGSGGGGSGGGGSGGGGSMAQKRPACTLKPECVQQLLVCSQEAKK |
| | SAYCPYSHFPVGAALLTQEGRIFKGCNIENACYPLGICAERTAIQKAVSEGYKDFRA |
| | IAIASDMQDDFISPCGACRQVMREFGTNWPVYMTKPDGTYIVMTVQELLPSSFGPE |
| | DLQKTQHHHHHH (SEQ ID NO: 110) |
| CDA_G4S | MAQKRPACTLKPECVQQLLVCSQEAKKSAYCPYSHFPVGAALLTQEGRIFKGCNIE |
| linker_Ab58_ | NACYPLGICAERTAIQKAVSEGYKDFRAIAIASDMQDDFISPCGACRQVMREFGTN |
| LC_(G4S)3_ | WPVYMTKPDGTYIVMTVQELLPSSFGPEDLQKTQGGGGSDIQMTQSPSSVSASVG |
| HC_HIS | DRVTITCRASQGISSWLAWYQQKPGKAPKLLLIYAASSLQSGVPSRFSGSGSGTDFT |
| | LTISSLQPEDFATYYCQQTNSFPYTFGGGTKVEIKGGGGSGGGGSGGGGSEVQLLE |
| | SGGGLVQPGGSLRLSCAASGETFSNYAMSWVRQAPGKGLEWVSAISGSGGSTYYA |
| | DSVKGRFTISRDNSKNTLYLQMNSLRAEDTAVYYCAKGPPTYHTNYYYMDVWGK |
| | GTTVTVSSHHHHHH (SEQ ID NO: 111) |
| CDA_G4S | MAQKRPACTLKPECVQQLLVCSQEAKKSAYCPYSHFPVGAALLTQEGRIFKGCNIE |
| linker_Ab61_ | NACYPLGICAERTAIQKAVSEGYKDFRAIAIASDMQDDFISPCGACRQVMREFGTN |
| LC_(G4S)3_ | WPVYMTKPDGTYIVMTVQELLPSSFGPEDLQKTQGGGGSDIQMTQSPSSVSASVG |
| HC_HIS | DRVTITCRASQGISSWLAWYQQKPGKAPKLLIYAASSLQQSGVPSRFSGSGSGTDF |
| | TLTISSLQPEDFATYYCQQTNSEPYTFGGGTKVEIKGGGGSGGGGSGGGGSEVQLL |
| | ESGGGLVQPGGSLRLSCAASGETESSYVMIWVRQAPGKGLEWVSSISGDSVTTYY |
| | ADSVKGRFTISRDNSKNTLYLQMNSLRAEDTAVYYCAKGPPTYHTNYYYMDVWG |
| | KGTTVTVSSHHHHHH (SEQ ID NO: 112) |
| CDA_G4S | MAQKRPACTLKPECVQQLLVCSQEAKKSAYCPYSHFPVGAALLTQEGRIFKGCNIE |
| linker_Ab66_ | NACYPLGICAERTAIQKAVSEGYKDFRAIAIASDMQDDFISPCGACRQVMREFGTN |
| LC_(G4S)3_ | WPVYMTKPDGTYIVMTVQELLPSSFGPEDLQKTQGGGGSDIQMTQSPSSLSASVG |
| HC_HIS | DRVTITCRASQSISSYLNWYQQKPGKAPKLLIYAASSLQSGVPSRFSGSGSGTDFTL |
| | TISSLQPEDFATYYCQQSYIAPYTFGGGTKVEIKGGGGSGGGGSGGGGSEVQLVES |
| | GGGLVQPGGSLRLSCAASGETFSDHYMDWVRQAPGKGLASGETFSDHYMDWVR |
| | QAPGKGL |
| | EWVGRIRNKASSYTTEYAASVKGRFTISRDDSKNSLYLQMNSLKTEDTAVYYCAR |
| | EPKYWIDFDLWGRGTLVTVSSHHHHHH (SEQ ID NO: 113) |
| CDA_G4S | MAQKRPACTLKPECVQQLLVCSQEAKKSAYCPYSHFPVGAALLTQEGRIFKGCNIE |
| linker_Ab68_ | NACYPLGICAERTAIQKAVSEGYKDFRAIAIASDMQDDFISPCGACRQVMREFGTN |
| LC_(G4S)3_ | WPVYMTKPDGTYIVMTVQELLPSSFGPEDLQKTQGGGGSDIQMTQSPSSLSASVG |
| HC_HIS | DRVTITCRASQSISSYLNWYQQKPGKAPKLLIYAASSLQSGVPSRFSGSGSGTDFTL |
| | TISSLQPEDFATYYCQQSYIAPYTFGGGTKVEIKGGGGSGGGGSGGGGSEVQLVES |
| | GGGLVQPGRSLRLSCTASGFTFSDHDMNWVRQAPGKGLEWVGRTRNAAGSYTTE |
| | YAASVKGRFTISRDDSKNSLYLQMNSLKTEDTAVYYCAREPKYWIDFDLWGRGTL |
| | VTSSHHHHHH (SEQ ID NO: 114) |
| CDA_G4S | MAQKRPACTLKPECVQQLLVCSQEAKKSAYCPYSHFPVGAALLTQEGRIFKGCNIE |
| linker_Ab69_ | NACYPLGICAERTAIQKAVSEGYKDFRAIAIASDMQDDFISPCGACRQVMREFGTN |
| LC_(G4S)3_ | WPVYMTKPDGTYIVMTVQELLPSSFGPEDLQKTQGGGGSEVQLVESGGGLVQPGG |
| HC_HIS | SLRLSCAASGETFVDHDMDWVRQAPGKGLEWVGRTRNKLGSYTTEYAASVKGRE |
| | TGRDDSKNSLYLQMNSLKTEDTAVYYCAREPKYWIDFDLWGRGTLVTVSSGGGG |
| | SGGGGSGGGGSDIQMTQSPSSLSASVGDRVTITCRASQSISSYLNWYQQKPGKAPK |
| | LLIYAASSLQSGVPSRFSGSGSGTDFTLTISSLQPEDFATYYCQQSYIAPYIFGGGTK |
| | VEIKHHHHHH (SEQ ID NO: 115) |
| CDA_(G4S)3 | MAQKRPACTLKPECVQQLLVCSQEAKKSAYCPYSHFPVGAALLTQEGRIFKGCNIE |
| linker_Ab58_ | NACYPLGICAERTAIQKAVSEGYKDFRAIAIASDMQDDFISPCGACRQVMREFGTN |
| LC_(G4S)3_ | WPVYMTKPDGTYIVMTVQELLPSSFGPEDLQKTQGGGGSGGGGSGGGGSDIQMT |
| HC_HIS | QSPSSVSASVGDRVTITCRASQGISSWLAWYQQKPGKAPKLLLIYAASSLQSGVPSR |
| | FSGSGSGTDFTLTISSLQPEDFATYYCQQTNSFPYTFGGGTKVEIKGGGGSGGGGSG |
| | GGGSEVQLLESGGGLVQPGGSLRLSCAASGETFSNYAMSWVRQAPGKGLEWVSAI |
| | SGSGGSTYYADSVKGRFTISRDNSKNTLYLQMNSLRAEDTAVYYCAKGPPTYHTN |
| | YYYMDVWGKGTTVTVSSHHHHHH (SEQ ID NO: 116) |
| CDA_(G4S)3 | MAQKRPACTLKPECVQQLLVCSQEAKKSAYCPYSHFPVGAALLTQEGRIFKGCNIE |
| linker_Ab61_ | NACYPLGICAERTAIQKAVSEGYKDFRAIAIASDMQDDFISPCGACRQVMREFGTN |
| LC_(G4S)3_ | WPVYMTKPDGTYIVMTVQELLPSSFGPEDLQKTQGGGGSGGGGSGGGGSDIQMT |
| HC_HIS | QSPSSVSASVGDRVTITCRASQGISSWLAWYQQKPGKAPKLLIYAASSLQQSGVPS |
| | RFSGSGSGTDFTLTISSLQPEDFATYYCQQTNSEPYTFGGGTKVEIKGGGGSGGGGS |
| | GGGGSEVQLLESGGGLVQPGGSLRLSCAASGETESSYVMIWVRQAPGKGLEWVSS |
| | ISGDSVTTYYADSVKGRFTISRDNSKNTLYLQMNSLRAEDTAVYYCAKGPPTYHT |
| | NYYYMDVWGKGTTVTVSSHHHHHH (SEQ ID NO: 117) |
| CDA_(G4S)3 | MAQKRPACTLKPECVQQLLVCSQEAKKSAYCPYSHFPVGAALLTQEGRIFKGCNIE |
| linker_Ab66_ | NACYPLGICAERTAIQKAVSEGYKDFRAIAIASDMQDDFISPCGACRQVMREFGTN |
| LC_(G4S)3_ | WPVYMTKPDGTYIVMTVQELLPSSFGPEDLQKTQGGGGSGGGGSGGGGSDIQMT |
| HC_HIS | QSPSSLSASVGDRVTITCRASQSISSYLNWYQQKPGKAPKLLIYAASSLQSGVPSRFS |
| | GSGSGTDFTLTISSLQPEDFATYYCQQSYIAPYTFGGGTKVEIKGGGGSGGGGSGG |
| | GGSEVQLVESGGGLVQPGGSLRLSCAASGETFSDHYMDWVRQAPGKGLASGETFS |
| | DHYMDWVRQAPGKGLEWVGRIRNKASSYTTEYAASVKGRFTISRDDSKNSLYLQ |
| | MNSLKTEDTAVYYCAREPKYWIDFDLWGRGTLVTVSSHHHHHH (SEQ ID NO: |
| | 118) |
| CDA_(G4S)3 | MAQKRPACTLKPECVQQLLVCSQEAKKSAYCPYSHFPVGAALLTQEGRIFKGCNIE |
| linker_Ab68_ | NACYPLGICAERTAIQKAVSEGYKDFRAIAIASDMQDDFISPCGACRQVMREFGTN |
| LC_(G4S)3_ | WPVYMTKPDGTYIVMTVQELLPSSFGPEDLQKTQGGGGSGGGGSGGGGSDIQMT |
| HC_HIS | QSPSSLSASVGDRVTITCRASQSISSYLNWYQQKPGKAPKLLIYAASSLQSGVPSRFS |
| | GSGSGTDFTLTISSLQPEDFATYYCQQSYIAPYTFGGGTKVEIKGGGGSGGGGSGG |
| | GGSEVQLVESGGGLVQPGRSLRLSCTASGFTFSDHDMNWVRQAPGKGLEWVGRT |
| | RNAAGSYTTEYAASVKGRFTISRDDSKNSLYLQMNSLKTEDTAVYYCAREPKYWI |
| | DFDLWGRGTLVTSSHHHHHH (SEQ ID NO: 119) |
| CDA_(G4S)3 | MAQKRPACTLKPECVQQLLVCSQEAKKSAYCPYSHFPVGAALLTQEGRIFKGCNIE |
| linker_Ab69_ | NACYPLGICAERTAIQKAVSEGYKDFRAIAIASDMQDDFISPCGACRQVMREFGTN |
| LC_(G4S)3_ | WPVYMTKPDGTYIVMTVQELLPSSFGPEDLQKTQGGGGSGGGGSGGGGSEVQLV |
| HC_HIS | ESGGGLVQPGGSLRLSCAASGETFVDHDMDWVRQAPGKGLEWVGRTRNKLGSYT |
| | TEYAASVKGRETGRDDSKNSLYLQMNSLKTEDTAVYYCAREPKYWIDFDLWGRG |
| | TLVTVSSGGGGSGGGGSGGGGSDIQMTQSPSSLSASVGDRVTITCRASQSISSYLN |
| | WYQQKPGKAPKLLIYAASSLQSGVPSRFSGSGSGTDFTLTISSLQPEDFATYYCQQS |
| | YIAPYIFGGGTKVEIKHHHHHH (SEQ ID NO: 120) |
| CDA_(G4S)4 | MAQKRPACTLKPECVQQLLVCSQEAKKSAYCPYSHFPVGAALLTQEGRIFKGCNIE |
| linker_Ab58_ | NACYPLGICAERTAIQKAVSEGYKDFRAIAIASDMQDDFISPCGACRQVMREFGTN |
| LC_(G4S)3_ | WPVYMTKPDGTYIVMTVQELLPSSFGPEDLQKTQGGGGSGGGGSGGGGSGGGGS |
| HC_HIS | DIQMTQSPSSVSASVGDRVTITCRASQGISSWLAWYQQKPGKAPKLLLIYAASSLQ |
| | SGVPSRFSGSGSGTDFTLTISSLQPEDFATYYCQQTNSFPYTFGGGTKVEIKGGGGS |
| | GGGGSGGGGSEVQLLESGGGLVQPGGSLRLSCAASGETFSNYAMSWVRQAPGKG |
| | LEWVSAISGSGGSTYYADSVKGRFTISRDNSKNTLYLQMNSLRAEDTAVYYCAKG |
| | PPTYHTNYYYMDVWGKGTTVTVSSHHHHHH (SEQ ID NO: 121) |
| CDA_(G4S)4 | MAQKRPACTLKPECVQQLLVCSQEAKKSAYCPYSHFPVGAALLTQEGRIFKGCNIE |
| linker_Ab61_ | NACYPLGICAERTAIQKAVSEGYKDFRAIAIASDMQDDFISPCGACRQVMREFGTN |
| LC_(G4S)3_ | WPVYMTKPDGTYIVMTVQELLPSSFGPEDLQKTQGGGGSGGGGSGGGGSGGGGS |
| HC_HIS | DIQMTQSPSSVSASVGDRVTITCRASQGISSWLAWYQQKPGKAPKLLIYAASSLQQ |
| | SGVPSRFSGSGSGTDFTLTISSLQPEDFATYYCQQTNSEPYTFGGGTKVEIKGGGGS |
| | GGGGSGGGGSEVQLLESGGGLVQPGGSLRLSCAASGETESSYVMIWVRQAPGKGL |
| | EWVSSISGDSVTTYYADSVKGRFTISRDNSKNTLYLQMNSLRAEDTAVYYCAKGP |
| | PTYHTNYYYMDVWGKGTTVTVSSHHHHHH (SEQ ID NO: 122) |
| CDA_(G4S)4 | MAQKRPACTLKPECVQQLLVCSQEAKKSAYCPYSHFPVGAALLTQEGRIFKGCNIE |
| linker_Ab66_ | NACYPLGICAERTAIQKAVSEGYKDFRAIAIASDMQDDFISPCGACRQVMREFGTN |
| LC_(G4S)3_ | WPVYMTKPDGTYIVMTVQELLPSSFGPEDLQKTQGGGGSGGGGSGGGGSGGGGS |
| HC_HIS | DIQMTQSPSSLSASVGDRVTITCRASQSISSYLNWYQQKPGKAPKLLIYAASSLQSG |
| | VPSRFSGSGSGTDFTLTISSLQPEDFATYYCQQSYIAPYTFGGGTKVEIKGGGGSGG |
| | GGSGGGGSEVQLVESGGGLVQPGGSLRLSCAASGETFSDHYMDWVRQAPGKGLA |
| | SGETFSDHYMDWVRQAPGKGLEWVGRIRNKASSYTTEYAASVKGRFTISRDDSKN |
| | SLYLQMNSLKTEDTAVYYCAREPKYWIDFDLWGRGTLVTVSSHHHHHH (SEQ ID |
| | NO: 123) |
| CDA_(G4S)4 | MAQKRPACTLKPECVQQLLVCSQEAKKSAYCPYSHFPVGAALLTQEGRIFKGCNIE |
| linker_Ab68_ | NACYPLGICAERTAIQKAVSEGYKDFRAIAIASDMQDDFISPCGACRQVMREFGTN |
| LC_(G4S)3_ | WPVYMTKPDGTYIVMTVQELLPSSFGPEDLQKTQGGGGSGGGGSGGGGSGGGGS |
| HC_HIS | DIQMTQSPSSLSASVGDRVTITCRASQSISSYLNWYQQKPGKAPKLLIYAASSLQSG |
| | VPSRFSGSGSGTDFTLTISSLQPEDFATYYCQQSYIAPYTFGGGTKVEIKGGGGSGG |
| | GGSGGGGSEVQLVESGGGLVQPGRSLRLSCTASGFTFSDHDMNWVRQAPGKGLE |
| | WVGRTRNAAGSYTTEYAASVKGRFTISRDDSKNSLYLQMNSLKTEDTAVYYCAR |
| | EPKYWIDFDLWGRGTLVTSSHHHHHH (SEQ ID NO: 124) |
| CDA_(G4S)4 | MAQKRPACTLKPECVQQLLVCSQEAKKSAYCPYSHFPVGAALLTQEGRIFKGCNIE |
| linker_Ab69_ | NACYPLGICAERTAIQKAVSEGYKDFRAIAIASDMQDDFISPCGACRQVMREFGTN |
| LC_(G4S)3_ | WPVYMTKPDGTYIVMTVQELLPSSFGPEDLQKTQGGGGSGGGGSGGGGSGGGGS |
| HC_HIS | EVQLVESGGGLVQPGGSLRLSCAASGETFVDHDMDWVRQAPGKGLEWVGRTRN |
| | KLGSYTTEYAASVKGRETGRDDSKNSLYLQMNSLKTEDTAVYYCAREPKYWIDF |
| | DLWGRGTLVTVSSGGGGSGGGGSGGGGSDIQMTQSPSSLSASVGDRVTITCRASQS |
| | ISSYLNWYQQKPGKAPKLLIYAASSLQSGVPSRFSGSGSGTDFTLTISSLQPEDFATY |
| | YCQQSYIAPYIFGGGTKVEIKHHHHHH (SEQ ID NO: 125) |
| CDA_(G4S)5 | MAQKRPACTLKPECVQQLLVCSQEAKKSAYCPYSHFPVGAALLTQEGRIFKGCNIE |
| linker_Ab58_ | NACYPLGICAERTAIQKAVSEGYKDFRAIAIASDMQDDFISPCGACRQVMREFGTN |
| LC_(G4S)3_ | WPVYMTKPDGTYIVMTVQELLPSSFGPEDLQKTQGGGGSGGGGSGGGGSGGGGS |
| HC_HIS | GGGGSDIQMTQSPSSVSASVGDRVTITCRASQGISSWLAWYQQKPGKAPKLLLIYA |
| | ASSLQSGVPSRFSGSGSGTDFTLTISSLQPEDFATYYCQQTNSFPYTFGGGTKVEIKG |
| | GGGSGGGGSGGGGSEVQLLESGGGLVQPGGSLRLSCAASGETFSNYAMSWVRQA |
| | PGKGLEWVSAISGSGGSTYYADSVKGRFTISRDNSKNTLYLQMNSLRAEDTAVYY |
| | CAKGPPTYHTNYYYMDVWGKGTTVTVSSHHHHHH (SEQ ID NO: 126) |
| CDA_(G4S)5 | MAQKRPACTLKPECVQQLLVCSQEAKKSAYCPYSHFPVGAALLTQEGRIFKGCNIE |
| linker_Ab61_ | NACYPLGICAERTAIQKAVSEGYKDFRAIAIASDMQDDFISPCGACRQVMREFGTN |
| LC_(G4S)3_ | WPVYMTKPDGTYIVMTVQELLPSSFGPEDLQKTQGGGGGGGGSGGGGSGGGGS |
| HC_HIS | GGGGSDIQMTQSPSSVSASVGDRVTITCRASQGISSWLAWYQQKPGKAPKLLIYAA |
| | SSLQQSGVPSRFSGSGSGTDFTLTISSLQPEDFATYYCQQTNSEPYTFGGGTKVEIKG |
| | GGGSGGGGSGGGGSEVQLLESGGGLVQPGGSLRLSCAASGETESSYVMIWVRQAP |
| | GKGLEWVSSISGDSVTTYYADSVKGRFTISRDNSKNTLYLQMNSLRAEDTAVYYC |
| | AKGPPTYHTNYYYMDVWGKGTTVTVSSHHHHHH (SEQ ID NO: 127) |
| CDA_(G4S)5 | MAQKRPACTLKPECVQQLLVCSQEAKKSAYCPYSHFPVGAALLTQEGRIFKGCNIE |
| linker_Ab66_ | NACYPLGICAERTAIQKAVSEGYKDFRAIAIASDMQDDFISPCGACRQVMREFGTN |
| LC_(G4S)3_ | WPVYMTKPDGTYIVMTVQELLPSSFGPEDLQKTQGGGGSGGGGSGGGGSGGGGS |
| HC_HIS | GGGGSDIQMTQSPSSLSASVGDRVTITCRASQSISSYLNWYQQKPGKAPKLLIYAAS |
| | SLQSGVPSRFSGSGSGTDFTLTISSLQPEDFATYYCQQSYIAPYTFGGGTKVEIKGGG |
| | GSGGGGGGGGSEVQLVESGGGLVQPGGSLRLSCAASGETFSDHYMDWVRQAPG |
| | KGLASGETFSDHYMDWVRQAPGKGLEWVGRIRNKASSYTTEYAASVKGRFTISRD |
| | DSKNSLYLQMNSLKTEDTAVYYCAREPKYWIDFDLWGRGTLVTVSSHHHHHH |
| | (SEQ ID NO: 128) |
| CDA_(G4S)5 | MAQKRPACTLKPECVQQLLVCSQEAKKSAYCPYSHFPVGAALLTQEGRIFKGCNIE |
| linker_Ab68_ | NACYPLGICAERTAIQKAVSEGYKDFRAIAIASDMQDDFISPCGACRQVMREFGTN |
| LC_(G4S)3_ | WPVYMTKPDGTYIVMTVQELLPSSFGPEDLQKTQGGGGSGGGGSGGGGSGGGGS |
| HC_HIS | GGGGSDIQMTQSPSSLSASVGDRVTITCRASQSISSYLNWYQQKPGKAPKLLIYAAS |
| | SLQSGVPSRFSGSGSGTDFTLTISSLQPEDFATYYCQQSYIAPYTFGGGTKVEIKGGG |
| | GSGGGGSGGGGSEVQLVESGGGLVQPGRSLRLSCTASGFTFSDHDMNWVRQAPG |
| | KGLEWVGRTRNAAGSYTTEYAASVKGRFTISRDDSKNSLYLQMNSLKTEDTAVY |
| | YCAREPKYWIDFDLWGRGTLVTSSHHHHHH (SEQ ID NO: 129) |
| CDA_(G4S)5 | MAQKRPACTLKPECVQQLLVCSQEAKKSAYCPYSHFPVGAALLTQEGRIFKGCNIE |
| linke_Ab69_ | NACYPLGICAERTAIQKAVSEGYKDFRAIAIASDMQDDFISPCGACRQVMREFGTN |
| LC_(G4S)3_ | WPVYMTKPDGTYIVMTVQELLPSSFGPEDLQKTQGGGGSGGGGSGGGGSGGGGS |
| HC_HIS | GGGGSEVQLVESGGGLVQPGGSLRLSCAASGETFVDHDMDWVRQAPGKGLEWV |
| | GRTRNKLGSYTTEYAASVKGRETGRDDSKNSLYLQMNSLKTEDTAVYYCAREPK |
| | YWIDFDLWGRGTLVTVSSGGGGSGGGGSGGGGSDIQMTQSPSSLSASVGDRVTIT |
| | CRASQSISSYLNWYQQKPGKAPKLLIYAASSLQSGVPSRFSGSGSGTDFTLTISSLQP |
| | EDFATYYCQQSYIAPYIFGGGTKVEIKHHHHHH (SEQ ID NO: 130) |
| CDA_(G4S)6 | MAQKRPACTLKPECVQQLLVCSQEAKKSAYCPYSHFPVGAALLTQEGRIFKGCNIE |
| linker_Ab58_ | NACYPLGICAERTAIQKAVSEGYKDFRAIAIASDMQDDFISPCGACRQVMREFGTN |
| LC_(G4S)3_ | WPVYMTKPDGTYIVMTVQELLPSSFGPEDLQKTQGGGGSGGGGSGGGGSGGGGS |
| HC_HIS | GGGGSGGGGSDIQMTQSPSSVSASVGDRVTITCRASQGISSWLAWYQQKPGKAPK |
| | LLLIYAASSLQSGVPSRFSGSGSGTDFTLTISSLQPEDFATYYCQQTNSFPYTFGGGT |
| | KVEIKGGGGSGGGGSGGGGSEVQLLESGGGLVQPGGSLRLSCAASGETFSNYAMS |
| | WVRQAPGKGLEWVSAISGSGGSTYYADSVKGRFTISRDNSKNTLYLQMNSLRAED |
| | TAVYYCAKGPPTYHTNYYYMDVWGKGTTVTVSSHHHHHH (SEQ ID NO: 131) |
| CDA_(G4S)6 | MAQKRPACTLKPECVQQLLVCSQEAKKSAYCPYSHFPVGAALLTQEGRIFKGCNIE |
| linker_Ab61_ | NACYPLGICAERTAIQKAVSEGYKDFRAIAIASDMQDDFISPCGACRQVMREFGTN |
| LC_(G4S)3_ | WPVYMTKPDGTYIVMTVQELLPSSFGPEDLQKTQGGGGSGGGGSGGGGSGGGGS |
| HC_HIS | GGGGGGGGSDIQMTQSPSSVSASVGDRVTITCRASQGISSWLAWYQQKPGKAPK |
| | LLIYAASSLQQSGVPSRFSGSGSGTDFTLTISSLQPEDFATYYCQQTNSEPYTFGGGT |
| | KVEIKGGGGSGGGGSGGGGSEVQLLESGGGLVQPGGSLRLSCAASGETESSYVMI |
| | WVRQAPGKGLEWVSSISGDSVTTYYADSVKGRFTISRDNSKNTLYLQMNSLRAED |
| | TAVYYCAKGPPTYHTNYYYMDVWGKGTTVTVSSHHHHHH (SEQ ID NO: 132) |
| CDA_(G4S)6 | MAQKRPACTLKPECVQQLLVCSQEAKKSAYCPYSHFPVGAALLTQEGRIFKGCNIE |
| linker_Ab66_ | NACYPLGICAERTAIQKAVSEGYKDFRAIAIASDMQDDFISPCGACRQVMREFGTN |
| LC_(G4S)3_ | WPVYMTKPDGTYIVMTVQELLPSSFGPEDLQKTQGGGGSGGGGSGGGGSGGGGS |
| HC_HIS | GGGGSGGGGSDIQMTQSPSSLSASVGDRVTITCRASQSISSYLNWYQQKPGKAPKL |
| | LIYAASSLQSGVPSRFSGSGSGTDFTLTISSLQPEDFATYYCQQSYIAPYTFGGGTKV |
| | EIKGGGGSGGGGSGGGGSEVQLVESGGGLVQPGGSLRLSCAASGETFSDHYMDW |
| | VRQAPGKGLASGETFSDHYMDWVRQAPGKGLEWVGRIRNKASSYTTEYAASVKG |
| | RFTISRDDSKNSLYLQMNSLKTEDTAVYYCAREPKYWIDFDLWGRGTLVTVSSHH |
| | HHHH (SEQ ID NO: 133) |
| CDA_(G4S)6 | MAQKRPACTLKPECVQQLLVCSQEAKKSAYCPYSHFPVGAALLTQEGRIFKGCNIE |
| linker_Ab68_ | NACYPLGICAERTAIQKAVSEGYKDFRAIAIASDMQDDFISPCGACRQVMREFGTN |
| LC_(G4S)3_ | WPVYMTKPDGTYIVMTVQELLPSSFGPEDLQKTQGGGGSGGGGSGGGGSGGGGS |
| HC_HIS | GGGGSGGGGSDIQMTQSPSSLSASVGDRVTITCRASQSISSYLNWYQQKPGKAPKL |
| | LIYAASSLQSGVPSRFSGSGSGTDFTLTISSLQPEDFATYYCQQSYIAPYTFGGGTKV |
| | EIKGGGGSGGGGSGGGGSEVQLVESGGGLVQPGRSLRLSCTASGFTFSDHDMNWV |
| | RQAPGKGLEWVGRTRNAAGSYTTEYAASVKGRFTISRDDSKNSLYLQMNSLKTED |
| | TAVYYCAREPKYWIDFDLWGRGTLVTSSHHHHHH (SEQ ID NO: 134) |
| CDA_(G4S)6 | MAQKRPACTLKPECVQQLLVCSQEAKKSAYCPYSHFPVGAALLTQEGRIFKGCNIE |
| linker_Ab69_ | NACYPLGICAERTAIQKAVSEGYKDFRAIAIASDMQDDFISPCGACRQVMREFGTN |
| LC_(G4S)3_ | WPVYMTKPDGTYIVMTVQELLPSSFGPEDLQKTQGGGGSGGGGSGGGGSGGGGS |
| HC_HIS | GGGGGGGGSEVQLVESGGGLVQPGGSLRLSCAASGETFVDHDMDWVRQAPGK |
| | GLEWVGRTRNKLGSYTTEYAASVKGRETGRDDSKNSLYLQMNSLKTEDTAVYYC |
| | AREPKYWIDFDLWGRGTLVTVSSGGGGSGGGGSGGGGSDIQMTQSPSSLSASVGD |
| | RVTITCRASQSISSYLNWYQQKPGKAPKLLIYAASSLQSGVPSRFSGSGSGTDFTLTI |
| | SSLQPEDFATYYCQQSYIAPYIFGGGTKVEIKHHHHHH (SEQ ID NO: 135) |
| CDA_(G4S)7 | MAQKRPACTLKPECVQQLLVCSQEAKKSAYCPYSHFPVGAALLTQEGRIFKGCNIE |
| linker_Ab58_ | NACYPLGICAERTAIQKAVSEGYKDFRAIAIASDMQDDFISPCGACRQVMREFGTN |
| LC_(G4S)3_ | WPVYMTKPDGTYIVMTVQELLPSSFGPEDLQKTQGGGGSGGGGSGGGGSGGGGS |
| HC_HIS | GGGGSGGGGSGGGGSDIQMTQSPSSVSASVGDRVTITCRASQGISSWLAWYQQKP |
| | GKAPKLLLIYAASSLQSGVPSRFSGSGSGTDFTLTISSLQPEDFATYYCQQTNSFPYT |
| | FGGGTKVEIKGGGGSGGGGSGGGGSEVQLLESGGGLVQPGGSLRLSCAASGETFS |
| | NYAMSWVRQAPGKGLEWVSAISGSGGSTYYADSVKGRFTISRDNSKNTLYLQMN |
| | SLRAEDTAVYYCAKGPPTYHTNYYYMDVWGKGTTVTVSSHHHHHH (SEQ ID NO: |
| | 136) |
| CDA_(G4S)7 | MAQKRPACTLKPECVQQLLVCSQEAKKSAYCPYSHFPVGAALLTQEGRIFKGCNIE |
| linker_Ab61_ | NACYPLGICAERTAIQKAVSEGYKDFRAIAIASDMQDDFISPCGACRQVMREFGTN |
| LC_(G4S)3_ | WPVYMTKPDGTYIVMTVQELLPSSFGPEDLQKTQGGGGSGGGGSGGGGSGGGGS |
| HC_HIS | GGGGSGGGGSGGGGSDIQMTQSPSSVSASVGDRVTITCRASQGISSWLAWYQQKP |
| | GKAPKLLIYAASSLQQSGVPSRFSGSGSGTDFTLTISSLQPEDFATYYCQQTNSEPYT |
| | FGGGTKVEIKGGGGSGGGGSGGGGSEVQLLESGGGLVQPGGSLRLSCAASGETESS |
| | YVMIWVRQAPGKGLEWVSSISGDSVTTYYADSVKGRFTISRDNSKNTLYLQMNSL |
| | RAEDTAVYYCAKGPPTYHTNYYYMDVWGKGTTVTVSSHHHHHH (SEQ ID NO: |
| | 137) |
| CDA_(G4S)7 | MAQKRPACTLKPECVQQLLVCSQEAKKSAYCPYSHFPVGAALLTQEGRIFKGCNIE |
| linker_Ab66_ | NACYPLGICAERTAIQKAVSEGYKDFRAIAIASDMQDDFISPCGACRQVMREFGTN |
| LC_(G4S)3_ | WPVYMTKPDGTYIVMTVQELLPSSFGPEDLQKTQGGGGSGGGGSGGGGSGGGGS |
| HC_HIS | GGGGSGGGGSGGGGSDIQMTQSPSSLSASVGDRVTITCRASQSISSYLNWYQQKPG |
| | KAPKLLIYAASSLQSGVPSRFSGSGSGTDFTLTISSLQPEDFATYYCQQSYIAPYTFG |
| | GGTKVEIKGGGGSGGGGSGGGGSEVQLVESGGGLVQPGGSLRLSCAASGETFSDH |
| | YMDWVRQAPGKGLASGETFSDHYMDWVRQAPGKGLEWVGRIRNKASSYTTEYA |
| | ASVKGRFTISRDDSKNSLYLQMNSLKTEDTAVYYCAREPKYWIDFDLWGRGTLVT |
| | VSSHHHHHH (SEQ ID NO: 138) |
| CDA_(G4S)7 | MAQKRPACTLKPECVQQLLVCSQEAKKSAYCPYSHFPVGAALLTQEGRIFKGCNIE |
| linker_Ab68_ | NACYPLGICAERTAIQKAVSEGYKDFRAIAIASDMQDDFISPCGACRQVMREFGTN |
| LC_(G4S)3_ | WPVYMTKPDGTYIVMTVQELLPSSFGPEDLQKTQGGGGSGGGGSGGGGSGGGGS |
| HC_HIS | GGGGSGGGGSGGGGSDIQMTQSPSSLSASVGDRVTITCRASQSISSYLNWYQQKPG |
| | KAPKLLIYAASSLQSGVPSRFSGSGSGTDFTLTISSLQPEDFATYYCQQSYIAPYTFG |
| | GGTKVEIKGGGGSGGGGSGGGGSEVQLVESGGGLVQPGRSLRLSCTASGFTFSDH |
| | DMNWVRQAPGKGLEWVGRTRNAAGSYTTEYAASVKGRFTISRDDSKNSLYLQM |
| | NSLKTEDTAVYYCAREPKYWIDFDLWGRGTLVTSSHHHHHH (SEQ ID NO: 139) |
| CDA_(G4S)7 | MAQKRPACTLKPECVQQLLVCSQEAKKSAYCPYSHFPVGAALLTQEGRIFKGCNIE |
| linker_Ab69_ | NACYPLGICAERTAIQKAVSEGYKDFRAIAIASDMQDDFISPCGACRQVMREFGTN |
| LC_(G4S)3_ | WPVYMTKPDGTYIVMTVQELLPSSFGPEDLQKTQGGGGSGGGGGGGGSGGGGS |
| HC_HIS | GGGGSGGGGSGGGGSEVQLVESGGGLVQPGGSLRLSCAASGETFVDHDMDWVR |
| | QAPGKGLEWVGRTRNKLGSYTTEYAASVKGRETGRDDSKNSLYLQMNSLKTEDT |
| | AVYYCAREPKYWIDFDLWGRGTLVTVSSGGGGSGGGGSGGGGSDIQMTQSPSSLS |
| | ASVGDRVTITCRASQSISSYLNWYQQKPGKAPKLLIYAASSLQSGVPSRFSGSGSGT |
| | DFTLTISSLQPEDFATYYCQQSYIAPYIFGGGTKVEIKHHHHHH (SEQ ID NO: 140) |
| CDA_(G4S)8 | MAQKRPACTLKPECVQQLLVCSQEAKKSAYCPYSHFPVGAALLTQEGRIFKGCNIE |
| linker_Ab58_ | NACYPLGICAERTAIQKAVSEGYKDFRAIAIASDMQDDFISPCGACRQVMREFGTN |
| LC_(G4S)3_ | WPVYMTKPDGTYIVMTVQELLPSSFGPEDLQKTQGGGGSGGGGSGGGGSGGGGS |
| HC_HIS | GGGGSGGGGSGGGGSGGGGSDIQMTQSPSSVSASVGDRVTITCRASQGISSWLAW |
| | YQQKPGKAPKLLLIYAASSLQSGVPSRFSGSGSGTDFTLTISSLQPEDFATYYCQQT |
| | NSFPYTFGGGTKVEIKGGGGSGGGGSGGGGSEVQLLESGGGLVQPGGSLRLSCAA |
| | SGETFSNYAMSWVRQAPGKGLEWVSAISGSGGSTYYADSVKGRFTISRDNSKNTL |
| | YLQMNSLRAEDTAVYYCAKGPPTYHTNYYYMDVWGKGTTVTVSSHHHHHH |
| | (SEQ ID NO: 141) |
| CDA_(G4S)8 | MAQKRPACTLKPECVQQLLVCSQEAKKSAYCPYSHFPVGAALLTQEGRIFKGCNIE |
| linker_Ab61_ | NACYPLGICAERTAIQKAVSEGYKDFRAIAIASDMQDDFISPCGACRQVMREFGTN |
| LC_(G4S)3_ | WPVYMTKPDGTYIVMTVQELLPSSFGPEDLQKTQGGGGSGGGGSGGGGSGGGGS |
| HC_HIS | GGGGSGGGGSGGGGSGGGGSDIQMTQSPSSVSASVGDRVTITCRASQGISSWLAW |
| | YQQKPGKAPKLLIYAASSLQQSGVPSRFSGSGSGTDFTLTISSLQPEDFATYYCQQT |
| | NSEPYTFGGGTKVEIKGGGGSGGGGSGGGGSEVQLLESGGGLVQPGGSLRLSCAA |
| | SGETESSYVMIWVRQAPGKGLEWVSSISGDSVTTYYADSVKGRFTISRDNSKNTLY |
| | LQMNSLRAEDTAVYYCAKGPPTYHTNYYYMDVWGKGTTVTVSSHHHHHH (SEQ |
| | ID NO: 142) |
| CDA_(G4S)8 | MAQKRPACTLKPECVQQLLVCSQEAKKSAYCPYSHFPVGAALLTQEGRIFKGCNIE |
| linker_Ab66_ | NACYPLGICAERTAIQKAVSEGYKDFRAIAIASDMQDDFISPCGACRQVMREFGTN |
| LC_(G4S)3_ | WPVYMTKPDGTYIVMTVQELLPSSFGPEDLQKTQGGGGSGGGGSGGGGSGGGGS |
| HC_HIS | GGGGSGGGGSGGGGSGGGGSDIQMTQSPSSLSASVGDRVTITCRASQSISSYLNWY |
| | QQKPGKAPKLLIYAASSLQSGVPSRFSGSGSGTDFTLTISSLQPEDFATYYCQQSYIA |
| | PYTFGGGTKVEIKGGGGSGGGGSGGGGSEVQLVESGGGLVQPGGSLRLSCAASGE |
| | TFSDHYMDWVRQAPGKGLASGETFSDHYMDWVRQAPGKGLEWVGRIRNKASSY |
| | TTEYAASVKGRFTISRDDSKNSLYLQMNSLKTEDTAVYYCAREPKYWIDFDLWGR |
| | GTLVTVSSHHHHHH (SEQ ID NO: 143) |
| CDA_(G4S)8 | MAQKRPACTLKPECVQQLLVCSQEAKKSAYCPYSHFPVGAALLTQEGRIFKGCNIE |
| linker_Ab68_ | NACYPLGICAERTAIQKAVSEGYKDFRAIAIASDMQDDFISPCGACRQVMREFGTN |
| LC_(G4S)3_ | WPVYMTKPDGTYIVMTVQELLPSSFGPEDLQKTQGGGGSGGGGSGGGGSGGGGS |
| HC_HIS | GGGGSGGGGSGGGGSGGGGSDIQMTQSPSSLSASVGDRVTITCRASQSISSYLNWY |
| | QQKPGKAPKLLIYAASSLQSGVPSRFSGSGSGTDFTLTISSLQPEDFATYYCQQSYIA |
| | PYTFGGGTKVEIKGGGGSGGGGSGGGGSEVQLVESGGGLVQPGRSLRLSCTASGF |
| | TFSDHDMNWVRQAPGKGLEWVGRTRNAAGSYTTEYAASVKGRFTISRDDSKNSL |
| | YLQMNSLKTEDTAVYYCAREPKYWIDFDLWGRGTLVTSSHHHHHH (SEQ ID NO: |
| | 144) |
| CDA_(G4S)8 | MAQKRPACTLKPECVQQLLVCSQEAKKSAYCPYSHFPVGAALLTQEGRIFKGCNIE |
| linker_Ab69_ | NACYPLGICAERTAIQKAVSEGYKDFRAIAIASDMQDDFISPCGACRQVMREFGTN |
| LC_(G4S)3_ | WPVYMTKPDGTYIVMTVQELLPSSFGPEDLQKTQGGGGSGGGGSGGGGSGGGGS |
| HC_HIS | GGGGSGGGGSGGGGSGGGGSEVQLVESGGGLVQPGGSLRLSCAASGETFVDHDM |
| | DWVRQAPGKGLEWVGRTRNKLGSYTTEYAASVKGRETGRDDSKNSLYLQMNSL |
| | KTEDTAVYYCAREPKYWIDFDLWGRGTLVTVSSGGGGSGGGGSGGGGSDIQMTQ |
| | SPSSLSASVGDRVTITCRASQSISSYLNWYQQKPGKAPKLLIYAASSLQSGVPSRFSG |
| | SGSGTDFTLTISSLQPEDFATYYCQQSYIAPYIFGGGTKVEIKHHHHHH (SEQ ID NO: |
| | 145) |
| CDA_(G4S)9 | MAQKRPACTLKPECVQQLLVCSQEAKKSAYCPYSHFPVGAALLTQEGRIFKGCNIE |
| linker_Ab58_ | NACYPLGICAERTAIQKAVSEGYKDFRAIAIASDMQDDFISPCGACRQVMREFGTN |
| LC_(G4S)3_ | WPVYMTKPDGTYIVMTVQELLPSSFGPEDLQKTQGGGGSGGGGSGGGGSGGGGS |
| HC_HIS | GGGGSGGGGSGGGGSGGGGSGGGGSDIQMTQSPSSVSASVGDRVTITCRASQGISS |
| | WLAWYQQKPGKAPKLLLIYAASSLQSGVPSRFSGSGSGTDFTLTISSLQPEDFATYY |
| | CQQTNSFPYTFGGGTKVEIKGGGGSGGGGSGGGGSEVQLLESGGGLVQPGGSLRL |
| | SCAASGETFSNYAMSWVRQAPGKGLEWVSAISGSGGSTYYADSVKGRFTISRDNS |
| | KNTLYLQMNSLRAEDTAVYYCAKGPPTYHTNYYYMDVWGKGTTVTVSSHHHHH |
| | H (SEQ ID NO: 146) |
| CDA_(G4S)9 | MAQKRPACTLKPECVQQLLVCSQEAKKSAYCPYSHFPVGAALLTQEGRIFKGCNIE |
| linker_Ab61_ | NACYPLGICAERTAIQKAVSEGYKDFRAIAIASDMQDDFISPCGACRQVMREFGTN |
| LC_(G4S)3_ | WPVYMTKPDGTYIVMTVQELLPSSFGPEDLQKTQGGGGSGGGGSGGGGSGGGGS |
| HC_HIS | GGGGSGGGGSGGGGSGGGGSGGGGSDIQMTQSPSSVSASVGDRVTITCRASQGISS |
| | WLAWYQQKPGKAPKLLIYAASSLQQSGVPSRFSGSGSGTDFTLTISSLQPEDFATY |
| | YCQQTNSEPYTFGGGTKVEIKGGGGSGGGGSGGGGSEVQLLESGGGLVQPGGSLR |
| | LSCAASGETESSYVMIWVRQAPGKGLEWVSSISGDSVTTYYADSVKGRFTISRDNS |
| | KNTLYLQMNSLRAEDTAVYYCAKGPPTYHTNYYYMDVWGKGTTVTVSSHHHHH |
| | H (SEQ ID NO: 147) |
| CDA_(G4S)9 | MAQKRPACTLKPECVQQLLVCSQEAKKSAYCPYSHFPVGAALLTQEGRIFKGCNIE |
| linker_Ab66_ | NACYPLGICAERTAIQKAVSEGYKDFRAIAIASDMQDDFISPCGACRQVMREFGTN |
| LC_(G4S)3_ | WPVYMTKPDGTYIVMTVQELLPSSFGPEDLQKTQGGGGSGGGGSGGGGSGGGGS |
| HC_HIS | GGGGGGGGSGGGGSGGGGSGGGGSDIQMTQSPSSLSASVGDRVTITCRASQSISS |
| | YLNWYQQKPGKAPKLLIYAASSLQSGVPSRFSGSGSGTDFTLTISSLQPEDFATYYC |
| | QQSYIAPYTFGGGTKVEIKGGGGSGGGGSGGGGSEVQLVESGGGLVQPGGSLRLS |
| | CAASGETFSDHYMDWVRQAPGKGLASGETFSDHYMDWVRQAPGKGLEWVGRIR |
| | NKASSYTTEYAASVKGRFTISRDDSKNSLYLQMNSLKTEDTAVYYCAREPKYWID |
| | FDLWGRGTLVTVSSHHHHHH (SEQ ID NO: 148) |
| CDA_(G4S)9 | MAQKRPACTLKPECVQQLLVCSQEAKKSAYCPYSHFPVGAALLTQEGRIFKGCNIE |
| linker_Ab68_ | NACYPLGICAERTAIQKAVSEGYKDFRAIAIASDMQDDFISPCGACRQVMREFGTN |
| LC_(G4S)3_ | WPVYMTKPDGTYIVMTVQELLPSSFGPEDLQKTQGGGGSGGGGSGGGGSGGGGS |
| HC_HIS | GGGGSGGGGSGGGGSGGGGSGGGGSDIQMTQSPSSLSASVGDRVTITCRASQSISS |
| | YLNWYQQKPGKAPKLLIYAASSLQSGVPSRFSGSGSGTDFTLTISSLQPEDFATYYC |
| | QQSYIAPYTFGGGTKVEIKGGGGSGGGGSGGGGSEVQLVESGGGLVQPGRSLRLS |
| | CTASGFTFSDHDMNWVRQAPGKGLEWVGRTRNAAGSYTTEYAASVKGRFTISRD |
| | DSKNSLYLQMNSLKTEDTAVYYCAREPKYWIDFDLWGRGTLVTSSHHHHHH |
| | (SEQ ID NO: 149) |
| CDA_(G4S)9 | MAQKRPACTLKPECVQQLLVCSQEAKKSAYCPYSHFPVGAALLTQEGRIFKGCNIE |
| linker_Ab69_ | NACYPLGICAERTAIQKAVSEGYKDFRAIAIASDMQDDFISPCGACRQVMREFGTN |
| LC_(G4S)3_ | WPVYMTKPDGTYIVMTVQELLPSSFGPEDLQKTQGGGGSGGGGSGGGGSGGGGS |
| HC_HIS | GGGGSGGGGSGGGGSGGGGSGGGGSEVQLVESGGGLVQPGGSLRLSCAASGETF |
| | VDHDMDWVRQAPGKGLEWVGRTRNKLGSYTTEYAASVKGRETGRDDSKNSLYL |
| | QMNSLKTEDTAVYYCAREPKYWIDFDLWGRGTLVTVSSGGGGSGGGGSGGGGSD |
| | IQMTQSPSSLSASVGDRVTITCRASQSISSYLNWYQQKPGKAPKLLIYAASSLQSGV |
| | PSRFSGSGSGTDFTLTISSLQPEDFATYYCQQSYIAPYIFGGGTKVEIKHHHHHH |
| | (SEQ ID NO: 150) |
| CDA_(G4S)10 | MAQKRPACTLKPECVQQLLVCSQEAKKSAYCPYSHFPVGAALLTQEGRIFKGCNIE |
| linker_Ab58_ | NACYPLGICAERTAIQKAVSEGYKDFRAIAIASDMQDDFISPCGACRQVMREFGTN |
| LC_(G4S)3_ | WPVYMTKPDGTYIVMTVQELLPSSFGPEDLQKTQGGGGSGGGGSGGGGSGGGGS |
| HC_HIS | GGGGSGGGGSGGGGSGGGGSGGGGSGGGGSDIQMTQSPSSVSASVGDRVTITCRA |
| | SQGISSWLAWYQQKPGKAPKLLLIYAASSLQSGVPSRFSGSGSGTDFTLTISSLQPE |
| | DFATYYCQQTNSFPYTFGGGTKVEIKGGGGSGGGGSGGGGSEVQLLESGGGLVQP |
| | GGSLRLSCAASGETFSNYAMSWVRQAPGKGLEWVSAISGSGGSTYYADSVKGRFT |
| | ISRDNSKNTLYLQMNSLRAEDTAVYYCAKGPPTYHTNYYYMDVWGKGTTVTVSS |
| | HHHHHH (SEQ ID NO: 151) |
| CDA_(G4S)10 | MAQKRPACTLKPECVQQLLVCSQEAKKSAYCPYSHFPVGAALLTQEGRIFKGCNIE |
| linker_Ab61_ | NACYPLGICAERTAIQKAVSEGYKDFRAIAIASDMQDDFISPCGACRQVMREFGTN |
| LC_(G4S)3_ | WPVYMTKPDGTYIVMTVQELLPSSFGPEDLQKTQGGGGSGGGGSGGGGSGGGGS |
| HC_HIS | GGGGSGGGGSGGGGSGGGGSGGGGSGGGGSDIQMTQSPSSVSASVGDRVTITCRA |
| | SQGISSWLAWYQQKPGKAPKLLIYAASSLQQSGVPSRFSGSGSGTDFTLTISSLQPE |
| | DFATYYCQQTNSEPYTFGGGTKVEIKGGGGSGGGGSGGGGSEVQLLESGGGLVQP |
| | GGSLRLSCAASGETESSYVMIWVRQAPGKGLEWVSSISGDSVTTYYADSVKGRFTI |
| | SRDNSKNTLYLQMNSLRAEDTAVYYCAKGPPTYHTNYYYMDVWGKGTTVTVSS |
| | HHHHHH (SEQ ID NO: 152) |
| CDA_(G4S)10 | MAQKRPACTLKPECVQQLLVCSQEAKKSAYCPYSHFPVGAALLTQEGRIFKGCNIE |
| linker_Ab66_ | NACYPLGICAERTAIQKAVSEGYKDFRAIAIASDMQDDFISPCGACRQVMREFGTN |
| LC_(G4S)3_ | WPVYMTKPDGTYIVMTVQELLPSSFGPEDLQKTQGGGGSGGGGSGGGGSGGGGS |
| HC_HIS | GGGGSGGGGSGGGGSGGGGGGGGSGGGGSDIQMTQSPSSLSASVGDRVTITCRA |
| | SQSISSYLNWYQQKPGKAPKLLIYAASSLQSGVPSRFSGSGSGTDFTLTISSLQPEDF |
| | ATYYCQQSYIAPYTFGGGTKVEIKGGGGSGGGGSGGGGSEVQLVESGGGLVQPGG |
| | SLRLSCAASGETFSDHYMDWVRQAPGKGLASGETFSDHYMDWVRQAPGKGLEW |
| | VGRIRNKASSYTTEYAASVKGRFTISRDDSKNSLYLQMNSLKTEDTAVYYCAREPK |
| | YWIDFDLWGRGTLVTVSSHHHHHH (SEQ ID NO: 153) |
| CDA_(G4S)10 | MAQKRPACTLKPECVQQLLVCSQEAKKSAYCPYSHFPVGAALLTQEGRIFKGCNIE |
| linker_Ab68_ | NACYPLGICAERTAIQKAVSEGYKDFRAIAIASDMQDDFISPCGACRQVMREFGTN |
| LC_(G4S)3_ | WPVYMTKPDGTYIVMTVQELLPSSFGPEDLQKTQGGGGSGGGGSGGGGSGGGGS |
| HC_HIS | GGGGSGGGGSGGGGSGGGGSGGGGSGGGGSDIQMTQSPSSLSASVGDRVTITCRA |
| | SQSISSYLNWYQQKPGKAPKLLIYAASSLQSGVPSRFSGSGSGTDFTLTISSLQPEDF |
| | ATYYCQQSYIAPYTFGGGTKVEIKGGGGSGGGGSGGGGSEVQLVESGGGLVQPGR |
| | SLRLSCTASGFTFSDHDMNWVRQAPGKGLEWVGRTRNAAGSYTTEYAASVKGRF |
| | TISRDDSKNSLYLQMNSLKTEDTAVYYCAREPKYWIDFDLWGRGTLVTSSHHHHH |
| | H (SEQ ID NO: 154) |
| CDA_(G4S)10 | MAQKRPACTLKPECVQQLLVCSQEAKKSAYCPYSHFPVGAALLTQEGRIFKGCNIE |
| linker_Ab69_ | NACYPLGICAERTAIQKAVSEGYKDFRAIAIASDMQDDFISPCGACRQVMREFGTN |
| LC_(G4S)3_ | WPVYMTKPDGTYIVMTVQELLPSSFGPEDLQKTQGGGGSGGGGSGGGGSGGGGS |
| HC_HIS | GGGGSGGGGSGGGGSGGGGSGGGGSGGGGSEVQLVESGGGLVQPGGSLRLSCAA |
| | SGETFVDHDMDWVRQAPGKGLEWVGRTRNKLGSYTTEYAASVKGRETGRDDSK |
| | NSLYLQMNSLKTEDTAVYYCAREPKYWIDFDLWGRGTLVTVSSGGGGSGGGGSG |
| | GGGSDIQMTQSPSSLSASVGDRVTITCRASQSISSYLNWYQQKPGKAPKLLIYAASS |
| | LQSGVPSRFSGSGSGTDFTLTISSLQPEDFATYYCQQSYIAPYIFGGGTKVEIKHHHH |
| | HH (SEQ ID NO: 155) |
| CDA_(G4S)11 | MAQKRPACTLKPECVQQLLVCSQEAKKSAYCPYSHFPVGAALLTQEGRIFKGCNIE |
| linker_Ab58_ | NACYPLGICAERTAIQKAVSEGYKDFRAIAIASDMQDDFISPCGACRQVMREFGTN |
| LC_(G4S)3_ | WPVYMTKPDGTYIVMTVQELLPSSFGPEDLQKTQGGGGSGGGGSGGGGSGGGGS |
| HC_HIS | GGGGSGGGGSGGGGSGGGGSGGGGGGGGSGGGGSDIQMTQSPSSVSASVGDRV |
| | TITCRASQGISSWLAWYQQKPGKAPKLLLIYAASSLQSGVPSRFSGSGSGTDFTLTIS |
| | SLQPEDFATYYCQQTNSFPYTFGGGTKVEIKGGGGSGGGGSGGGGSEVQLLESGG |
| | GLVQPGGSLRLSCAASGETFSNYAMSWVRQAPGKGLEWVSAISGSGGSTYYADSV |
| | KGRFTISRDNSKNTLYLQMNSLRAEDTAVYYCAKGPPTYHTNYYYMDVWGKGTT |
| | VTVSSHHHHHH (SEQ ID NO: 156) |
| CDA_(G4S)11 | MAQKRPACTLKPECVQQLLVCSQEAKKSAYCPYSHFPVGAALLTQEGRIFKGCNIE |
| linker_Ab61_ | NACYPLGICAERTAIQKAVSEGYKDFRAIAIASDMQDDFISPCGACRQVMREFGTN |
| LC_(G4S)3_ | WPVYMTKPDGTYIVMTVQELLPSSFGPEDLQKTQGGGGSGGGGSGGGGSGGGGS |
| HC_HIS | GGGGSGGGGSGGGGSGGGGSGGGGSGGGGSGGGGSDIQMTQSPSSVSASVGDRV |
| | TITCRASQGISSWLAWYQQKPGKAPKLLIYAASSLQQSGVPSRFSGSGSGTDFTLTI |
| | SSLQPEDFATYYCQQTNSEPYTFGGGTKVEIKGGGGSGGGGSGGGGSEVQLLESG |
| | GGLVQPGGSLRLSCAASGETESSYVMIWVRQAPGKGLEWVSSISGDSVTTYYADS |
| | VKGRFTISRDNSKNTLYLQMNSLRAEDTAVYYCAKGPPTYHTNYYYMDVWGKG |
| | TTVTVSSHHHHHH (SEQ ID NO: 157) |
| CDA_(G4S)11 | MAQKRPACTLKPECVQQLLVCSQEAKKSAYCPYSHFPVGAALLTQEGRIFKGCNIE |
| linker_Ab66_ | NACYPLGICAERTAIQKAVSEGYKDFRAIAIASDMQDDFISPCGACRQVMREFGTN |
| LC_(G4S)3_ | WPVYMTKPDGTYIVMTVQELLPSSFGPEDLQKTQGGGGSGGGGSGGGGSGGGGS |
| HC_HIS | GGGGSGGGGSGGGGSGGGGSGGGGSGGGGSGGGGSDIQMTQSPSSLSASVGDRV |
| | TITCRASQSISSYLNWYQQKPGKAPKLLIYAASSLQSGVPSRFSGSGSGTDFTLTISS |
| | LQPEDFATYYCQQSYIAPYTFGGGTKVEIKGGGGSGGGGSGGGGSEVQLVESGGG |
| | LVQPGGSLRLSCAASGETFSDHYMDWVRQAPGKGLASGETFSDHYMDWVRQAP |
| | GKGLEWVGRIRNKASSYTTEYAASVKGRFTISRDDSKNSLYLQMNSLKTEDTAVY |
| | YCAREPKYWIDFDLWGRGTLVTVSSHHHHHH (SEQ ID NO: 158) |
| CDA_(G4S)11 | MAQKRPACTLKPECVQQLLVCSQEAKKSAYCPYSHFPVGAALLTQEGRIFKGCNIE |
| linker_Ab68_ | NACYPLGICAERTAIQKAVSEGYKDFRAIAIASDMQDDFISPCGACRQVMREFGTN |
| LC_(G4S)3_ | WPVYMTKPDGTYIVMTVQELLPSSFGPEDLQKTQGGGGSGGGGSGGGGSGGGGS |
| HC_HIS | GGGGSGGGGSGGGGSGGGGSGGGGSGGGGSGGGGSDIQMTQSPSSLSASVGDRV |
| | TITCRASQSISSYLNWYQQKPGKAPKLLIYAASSLQSGVPSRFSGSGSGTDFTLTISS |
| | LQPEDFATYYCQQSYIAPYTFGGGTKVEIKGGGGSGGGGSGGGGSEVQLVESGGG |
| | LVQPGRSLRLSCTASGFTFSDHDMNWVRQAPGKGLEWVGRTRNAAGSYTTEYAA |
| | SVKGRFTISRDDSKNSLYLQMNSLKTEDTAVYYCAREPKYWIDFDLWGRGTLVTS |
| | SHHHHHH (SEQ ID NO: 159) |
| CDA_(G4S)11 | MAQKRPACTLKPECVQQLLVCSQEAKKSAYCPYSHFPVGAALLTQEGRIFKGCNIE |
| linker_Ab69_ | NACYPLGICAERTAIQKAVSEGYKDFRAIAIASDMQDDFISPCGACRQVMREFGTN |
| LC_(G4S)3_ | WPVYMTKPDGTYIVMTVQELLPSSFGPEDLQKTQGGGGSGGGGSGGGGSGGGGS |
| HC_HIS | GGGGSGGGGSGGGGGGGGSGGGGSGGGGSGGGGSEVQLVESGGGLVQPGGSLR |
| | LSCAASGETFVDHDMDWVRQAPGKGLEWVGRTRNKLGSYTTEYAASVKGRETG |
| | RDDSKNSLYLQMNSLKTEDTAVYYCAREPKYWIDFDLWGRGTLVTVSSGGGGSG |
| | GGGSGGGGSDIQMTQSPSSLSASVGDRVTITCRASQSISSYLNWYQQKPGKAPKLLI |
| | YAASSLQSGVPSRFSGSGSGTDFTLTISSLQPEDFATYYCQQSYIAPYIFGGGTKVEI |
| | KHHHHHH (SEQ ID NO: 160) |
| CDA_(G4S)112 | MAQKRPACTLKPECVQQLLVCSQEAKKSAYCPYSHFPVGAALLTQEGRIFKGCNIE |
| linker_Ab58_ | NACYPLGICAERTAIQKAVSEGYKDFRAIAIASDMQDDFISPCGACRQVMREFGTN |
| LC_(G4S)3_ | WPVYMTKPDGTYIVMTVQELLPSSFGPEDLQKTQGGGGSGGGGSGGGGSGGGGS |
| HC_HIS | GGGGSGGGGSGGGGSGGGGSGGGGSGGGGSGGGGSGGGGSDIQMTQSPSSVSAS |
| | VGDRVTITCRASQGISSWLAWYQQKPGKAPKLLLIYAASSLQSGVPSRFSGSGSGT |
| | DFTLTISSLQPEDFATYYCQQTNSFPYTFGGGTKVEIKGGGGSGGGGSGGGGSEVQ |
| | LLESGGGLVQPGGSLRLSCAASGETFSNYAMSWVRQAPGKGLEWVSAISGSGGST |
| | YYADSVKGRFTISRDNSKNTLYLQMNSLRAEDTAVYYCAKGPPTYHTNYYYMDV |
| | WGKGTTVTVSSHHHHHH (SEQ ID NO: 161) |
| CDA_(G4S)112 | MAQKRPACTLKPECVQQLLVCSQEAKKSAYCPYSHFPVGAALLTQEGRIFKGCNIE |
| linker_Ab61_ | NACYPLGICAERTAIQKAVSEGYKDFRAIAIASDMQDDFISPCGACRQVMREFGTN |
| LC_(G4S)3_ | WPVYMTKPDGTYIVMTVQELLPSSFGPEDLQKTQGGGGSGGGGSGGGGSGGGGS |
| HC_HIS | GGGGSGGGGSGGGGSGGGGSGGGGSGGGGSGGGGSGGGGSDIQMTQSPSSVSAS |
| | VGDRVTITCRASQGISSWLAWYQQKPGKAPKLLIYAASSLQQSGVPSRFSGSGSGT |
| | DFTLTISSLQPEDFATYYCQQTNSEPYTFGGGTKVEIKGGGGSGGGGSGGGGSEVQ |
| | LLESGGGLVQPGGSLRLSCAASGETESSYVMIWVRQAPGKGLEWVSSISGDSVTTY |
| | YADSVKGRFTISRDNSKNTLYLQMNSLRAEDTAVYYCAKGPPTYHTNYYYMDVW |
| | GKGTTVTVSSHHHHHH (SEQ ID NO: 162) |
| CDA_(G4S)112 | MAQKRPACTLKPECVQQLLVCSQEAKKSAYCPYSHFPVGAALLTQEGRIFKGCNIE |
| linker_Ab66_ | NACYPLGICAERTAIQKAVSEGYKDFRAIAIASDMQDDFISPCGACRQVMREFGTN |
| LC_(G4S)3_ | WPVYMTKPDGTYIVMTVQELLPSSFGPEDLQKTQGGGGSGGGGSGGGGSGGGGS |
| HC_HIS | GGGGSGGGGSGGGGSGGGGSGGGGSGGGGSGGGGSGGGGSDIQMTQSPSSLSAS |
| | VGDRVTITCRASQSISSYLNWYQQKPGKAPKLLIYAASSLQSGVPSRFSGSGSGTDF |
| | TLTISSLQPEDFATYYCQQSYIAPYTFGGGTKVEIKGGGGSGGGGSGGGGSEVQLV |
| | ESGGGLVQPGGSLRLSCAASGETFSDHYMDWVRQAPGKGLASGETFSDHYMDWV |
| | RQAPGKGLEWVGRIRNKASSYTTEYAASVKGRFTISRDDSKNSLYLQMNSLKTED |
| | TAVYYCAREPKYWIDFDLWGRGTLVTVSSHHHHHH (SEQ ID NO: 163) |
| CDA_(G4S)112 | MAQKRPACTLKPECVQQLLVCSQEAKKSAYCPYSHFPVGAALLTQEGRIFKGCNIE |
| linker_Ab68_ | NACYPLGICAERTAIQKAVSEGYKDFRAIAIASDMQDDFISPCGACRQVMREFGTN |
| LC_(G4S)3_ | WPVYMTKPDGTYIVMTVQELLPSSFGPEDLQKTQGGGGSGGGGSGGGGSGGGGS |
| HC_HIS | GGGGSGGGGSGGGGSGGGGSGGGGSGGGGSGGGGSGGGGSDIQMTQSPSSLSAS |
| | VGDRVTITCRASQSISSYLNWYQQKPGKAPKLLIYAASSLQSGVPSRFSGSGSGTDF |
| | TLTISSLQPEDFATYYCQQSYIAPYTFGGGTKVEIKGGGGSGGGGSGGGGSEVQLV |
| | ESGGGLVQPGRSLRLSCTASGFTFSDHDMNWVRQAPGKGLEWVGRTRNAAGSYT |
| | TEYAASVKGRFTISRDDSKNSLYLQMNSLKTEDTAVYYCAREPKYWIDFDLWGRG |
| | TLVTSSHHHHHH (SEQ ID NO: 164) |
| CDA_(G4S)112 | MAQKRPACTLKPECVQQLLVCSQEAKKSAYCPYSHFPVGAALLTQEGRIFKGCNIE |
| linker_Ab69_ | NACYPLGICAERTAIQKAVSEGYKDFRAIAIASDMQDDFISPCGACRQVMREFGTN |
| LC_(G4S)3_ | WPVYMTKPDGTYIVMTVQELLPSSFGPEDLQKTQGGGGSGGGGSGGGGSGGGGS |
| HC_HIS | GGGGSGGGGSGGGGSGGGGSGGGGSGGGGSGGGGSGGGGSEVQLVESGGGLVQ |
| | PGGSLRLSCAASGETFVDHDMDWVRQAPGKGLEWVGRTRNKLGSYTTEYAASVK |
| | GRETGRDDSKNSLYLQMNSLKTEDTAVYYCAREPKYWIDFDLWGRGTLVTVSSG |
| | GGGSGGGGSGGGGSDIQMTQSPSSLSASVGDRVTITCRASQSISSYLNWYQQKPGK |
| | APKLLIYAASSLQSGVPSRFSGSGSGTDFTLTISSLQPEDFATYYCQQSYIAPYIFGG |
| | GTKVEIKHHHHHH (SEQ ID NO: 165) |
| CDA_G4S | MAQKRPACTLKPECVQQLLVCSQEAKKSAYCPYSHFPVGAALLTQEGRIFKGCNIE |
| linker_Ab58_ | NACYPLGICAERTAIQKAVSEGYKDFRAIAIASDMQDDFISPCGACRQVMREFGTN |
| HC_(G4S)3_ | WPVYMTKPDGTYIVMTVQELLPSSFGPEDLQKTQGGGGSEVQLLESGGGLVQPGG |
| LC_HIS | SLRLSCAASGETFSNYAMSWVRQAPGKGLEWVSAISGSGGSTYYADSVKGRFTISR |
| | DNSKNTLYLQMNSLRAEDTAVYYCAKGPPTYHTNYYYMDVWGKGTTVTVSSGG |
| | GGSGGGGSGGGGSDIQMTQSPSSVSASVGDRVTITCRASQGISSWLAWYQQKPGK |
| | APKLLLIYAASSLQSGVPSRFSGSGSGTDFTLTISSLQPEDFATYYCQQTNSFPYTFG |
| | GGTKVEIKHHHHHH (SEQ ID NO: 166) |
| CDA_G4S | MAQKRPACTLKPECVQQLLVCSQEAKKSAYCPYSHFPVGAALLTQEGRIFKGCNIE |
| linker_Ab61_ | NACYPLGICAERTAIQKAVSEGYKDFRAIAIASDMQDDFISPCGACRQVMREFGTN |
| HC_(G4S)3_ | WPVYMTKPDGTYIVMTVQELLPSSFGPEDLQKTQGGGGSEVQLLESGGGLVQPGG |
| LC_HIS | SLRLSCAASGETESSYVMIWVRQAPGKGLEWVSSISGDSVTTYYADSVKGRFTISR |
| | DNSKNTLYLQMNSLRAEDTAVYYCAKGPPTYHTNYYYMDVWGKGTTVTVSSGG |
| | GGSGGGGSGGGGSDIQMTQSPSSVSASVGDRVTITCRASQGISSWLAWYQQKPGK |
| | APKLLIYAASSLQQSGVPSRFSGSGSGTDFTLTISSLQPEDFATYYCQQTNSEPYTFG |
| | GGTKVEIKHHHHHH (SEQ ID NO: 167) |
| CDA_G4S | MAQKRPACTLKPECVQQLLVCSQEAKKSAYCPYSHFPVGAALLTQEGRIFKGCNIE |
| linker_Ab66_ | NACYPLGICAERTAIQKAVSEGYKDFRAIAIASDMQDDFISPCGACRQVMREFGTN |
| HC_(G4S)3_ | WPVYMTKPDGTYIVMTVQELLPSSFGPEDLQKTQGGGGSEVQLVESGGGLVQPGG |
| LC_HIS | SLRLSCAASGETFSDHYMDWVRQAPGKGLASGETFSDHYMDWVRQAPGKGLEW |
| | VGRIRNKASSYTTEYAASVKGRFTISRDDSKNSLYLQMNSLKTEDTAVYYCAREPK |
| | YWIDFDLWGRGTLVTVSSGGGGSGGGGSGGGGSDIQMTQSPSSLSASVGDRVTIT |
| | CRASQSISSYLNWYQQKPGKAPKLLIYAASSLQSGVPSRFSGSGSGTDFTLTISSLQP |
| | EDFATYYCQQSYIAPYTFGGGTKVEIKHHHHHH (SEQ ID NO: 168) |
| CDA_G4S | MAQKRPACTLKPECVQQLLVCSQEAKKSAYCPYSHFPVGAALLTQEGRIFKGCNIE |
| linker_Ab68_ | NACYPLGICAERTAIQKAVSEGYKDFRAIAIASDMQDDFISPCGACRQVMREFGTN |
| HC_(G4S)3_ | WPVYMTKPDGTYIVMTVQELLPSSFGPEDLQKTQGGGGSEVQLVESGGGLVQPGR |
| LC_HIS | SLRLSCTASGFTFSDHDMNWVRQAPGKGLEWVGRTRNAAGSYTTEYAASVKGRF |
| | TISRDDSKNSLYLQMNSLKTEDTAVYYCAREPKYWIDFDLWGRGTLVTSSGGGGS |
| | GGGGGGGGSDIQMTQSPSSLSASVGDRVTITCRASQSISSYLNWYQQKPGKAPKL |
| | LIYAASSLQSGVPSRFSGSGSGTDFTLTISSLQPEDFATYYCQQSYIAPYTFGGGTKV |
| | EIKHHHHHH (SEQ ID NO: 169) |
| CDA_G4S | MAQKRPACTLKPECVQQLLVCSQEAKKSAYCPYSHFPVGAALLTQEGRIFKGCNIE |
| linker_Ab69_ | NACYPLGICAERTAIQKAVSEGYKDFRAIAIASDMQDDFISPCGACRQVMREFGTN |
| HC_(G4S)3_ | WPVYMTKPDGTYIVMTVQELLPSSFGPEDLQKTQGGGGSDIQMTQSPSSLSASVG |
| LC_HIS | DRVTITCRASQSISSYLNWYQQKPGKAPKLLIYAASSLQSGVPSRFSGSGSGTDFTL |
| | TISSLQPEDFATYYCQQSYIAPYIFGGGTKVEIKGGGGSGGGGSGGGGSEVQLVESG |
| | GGLVQPGGSLRLSCAASGETFVDHDMDWVRQAPGKGLEWVGRTRNKLGSYTTE |
| | YAASVKGRETGRDDSKNSLYLQMNSLKTEDTAVYYCAREPKYWIDFDLWGRGTL |
| | VTVSSHHHHHH (SEQ ID NO: 170) |
| CDA_(G4S)3 | MAQKRPACTLKPECVQQLLVCSQEAKKSAYCPYSHFPVGAALLTQEGRIFKGCNIE |
| linker_Ab58_ | NACYPLGICAERTAIQKAVSEGYKDFRAIAIASDMQDDFISPCGACRQVMREFGTN |
| HC_(G4S)3_ | WPVYMTKPDGTYIVMTVQELLPSSFGPEDLQKTQGGGGSGGGGSGGGGSEVQLLE |
| LC_HIS | SGGGLVQPGGSLRLSCAASGETFSNYAMSWVRQAPGKGLEWVSAISGSGGSTYYA |
| | DSVKGRFTISRDNSKNTLYLQMNSLRAEDTAVYYCAKGPPTYHTNYYYMDVWGK |
| | GTTVTVSSGGGGSGGGGSGGGGSDIQMTQSPSSVSASVGDRVTITCRASQGISSWL |
| | AWYQQKPGKAPKLLLIYAASSLQSGVPSRFSGSGSGTDFTLTISSLQPEDFATYYCQ |
| | QTNSFPYTFGGGTKVEIKHHHHHH (SEQ ID NO: 171) |
| CDA_(G4S)3 | MAQKRPACTLKPECVQQLLVCSQEAKKSAYCPYSHFPVGAALLTQEGRIFKGCNIE |
| linker_Ab61_ | NACYPLGICAERTAIQKAVSEGYKDFRAIAIASDMQDDFISPCGACRQVMREFGTN |
| HC_(G4S)3_ | WPVYMTKPDGTYIVMTVQELLPSSFGPEDLQKTQGGGGSGGGGSGGGGSEVQLLE |
| LC_HIS | SGGGLVQPGGSLRLSCAASGETESSYVMIWVRQAPGKGLEWVSSISGDSVTTYYA |
| | DSVKGRFTISRDNSKNTLYLQMNSLRAEDTAVYYCAKGPPTYHTNYYYMDVWGK |
| | GTTVTVSSGGGGSGGGGSGGGGSDIQMTQSPSSVSASVGDRVTITCRASQGISSWL |
| | AWYQQKPGKAPKLLIYAASSLQQSGVPSRFSGSGSGTDFTLTISSLQPEDFATYYCQ |
| | QTNSEPYTFGGGTKVEIKHHHHHH (SEQ ID NO: 172) |
| CDA_(G4S)3 | MAQKRPACTLKPECVQQLLVCSQEAKKSAYCPYSHFPVGAALLTQEGRIFKGCNIE |
| linker_Ab66_ | NACYPLGICAERTAIQKAVSEGYKDFRAIAIASDMQDDFISPCGACRQVMREFGTN |
| HC_(G4S)3_ | WPVYMTKPDGTYIVMTVQELLPSSFGPEDLQKTQGGGGSGGGGSGGGGSEVQLV |
| LC_HIS | ESGGGLVQPGGSLRLSCAASGETFSDHYMDWVRQAPGKGLASGETFSDHYMDWV |
| | RQAPGKGLEWVGRIRNKASSYTTEYAASVKGRFTISRDDSKNSLYLQMNSLKTED |
| | TAVYYCAREPKYWIDFDLWGRGTLVTVSSGGGGSGGGGSGGGGSDIQMTQSPSSL |
| | SASVGDRVTITCRASQSISSYLNWYQQKPGKAPKLLIYAASSLQSGVPSRFSGSGSG |
| | TDFTLTISSLQPEDFATYYCQQSYIAPYTFGGGTKVEIKHHHHHH (SEQ ID NO: 173) |
| CDA_(G4S)3 | MAQKRPACTLKPECVQQLLVCSQEAKKSAYCPYSHFPVGAALLTQEGRIFKGCNIE |
| linker_Ab68_ | NACYPLGICAERTAIQKAVSEGYKDFRAIAIASDMQDDFISPCGACRQVMREFGTN |
| HC_(G4S)3_ | WPVYMTKPDGTYIVMTVQELLPSSFGPEDLQKTQGGGGSGGGGSGGGGSEVQLV |
| LC_HIS | ESGGGLVQPGRSLRLSCTASGFTFSDHDMNWVRQAPGKGLEWVGRTRNAAGSYT |
| | TEYAASVKGRFTISRDDSKNSLYLQMNSLKTEDTAVYYCAREPKYWIDFDLWGRG |
| | TLVTSSGGGGSGGGGSGGGGSDIQMTQSPSSLSASVGDRVTITCRASQSISSYLNW |
| | YQQKPGKAPKLLIYAASSLQSGVPSRFSGSGSGTDFTLTISSLQPEDFATYYCQQSYI |
| | APYTFGGGTKVEIKHHHHHH (SEQ ID NO: 174) |
| CDA_(G4S)3 | MAQKRPACTLKPECVQQLLVCSQEAKKSAYCPYSHFPVGAALLTQEGRIFKGCNIE |
| linker_Ab69_ | NACYPLGICAERTAIQKAVSEGYKDFRAIAIASDMQDDFISPCGACRQVMREFGTN |
| HC_(G4S)3_ | WPVYMTKPDGTYIVMTVQELLPSSFGPEDLQKTQGGGGSGGGGSGGGGSDIQMT |
| LC_HIS | QSPSSLSASVGDRVTITCRASQSISSYLNWYQQKPGKAPKLLIYAASSLQSGVPSRFS |
| | GSGSGTDFTLTISSLQPEDFATYYCQQSYIAPYIFGGGTKVEIKGGGGSGGGGSGGG |
| | GSEVQLVESGGGLVQPGGSLRLSCAASGETFVDHDMDWVRQAPGKGLEWVGRTR |
| | NKLGSYTTEYAASVKGRETGRDDSKNSLYLQMNSLKTEDTAVYYCAREPKYWID |
| | FDLWGRGTLVTVSSHHHHHH (SEQ ID NO: 175) |
| CDA_(G4S)4 | MAQKRPACTLKPECVQQLLVCSQEAKKSAYCPYSHFPVGAALLTQEGRIFKGCNIE |
| linker_Ab58_ | NACYPLGICAERTAIQKAVSEGYKDFRAIAIASDMQDDFISPCGACRQVMREFGTN |
| HC_(G4S)3_ | WPVYMTKPDGTYIVMTVQELLPSSFGPEDLQKTQGGGGSGGGGSGGGGSGGGGS |
| LC_HIS | EVQLLESGGGLVQPGGSLRLSCAASGETFSNYAMSWVRQAPGKGLEWVSAISGSG |
| | GSTYYADSVKGRFTISRDNSKNTLYLQMNSLRAEDTAVYYCAKGPPTYHTNYYY |
| | MDVWGKGTTVTVSSGGGGSGGGGSGGGGSDIQMTQSPSSVSASVGDRVTITCRAS |
| | QGISSWLAWYQQKPGKAPKLLLIYAASSLQSGVPSRFSGSGSGTDFTLTISSLQPED |
| | FATYYCQQTNSFPYTFGGGTKVEIKHHHHHH (SEQ ID NO: 176) |
| CDA_(G4S)4 | MAQKRPACTLKPECVQQLLVCSQEAKKSAYCPYSHFPVGAALLTQEGRIFKGCNIE |
| linker_Ab61_ | NACYPLGICAERTAIQKAVSEGYKDFRAIAIASDMQDDFISPCGACRQVMREFGTN |
| HC_(G4S)3_ | WPVYMTKPDGTYIVMTVQELLPSSFGPEDLQKTQGGGGSGGGGSGGGGGGGGS |
| LC_HIS | EVQLLESGGGLVQPGGSLRLSCAASGETESSYVMIWVRQAPGKGLEWVSSISGDSV |
| | TTYYADSVKGRFTISRDNSKNTLYLQMNSLRAEDTAVYYCAKGPPTYHTNYYYM |
| | DVWGKGTTVTVSSGGGGSGGGGSGGGGSDIQMTQSPSSVSASVGDRVTITCRASQ |
| | GISSWLAWYQQKPGKAPKLLIYAASSLQQSGVPSRFSGSGSGTDFTLTISSLQPEDF |
| | ATYYCQQTNSEPYTFGGGTKVEIKHHHHHH (SEQ ID NO: 177) |
| CDA_(G4S)4 | MAQKRPACTLKPECVQQLLVCSQEAKKSAYCPYSHFPVGAALLTQEGRIFKGCNIE |
| linker_Ab66_ | NACYPLGICAERTAIQKAVSEGYKDFRAIAIASDMQDDFISPCGACRQVMREFGTN |
| HC_(G4S)3_ | WPVYMTKPDGTYIVMTVQELLPSSFGPEDLQKTQGGGGSGGGGSGGGGSGGGGS |
| LC_HIS | EVQLVESGGGLVQPGGSLRLSCAASGETFSDHYMDWVRQAPGKGLASGETFSDH |
| | YMDWVRQAPGKGLEWVGRIRNKASSYTTEYAASVKGRFTISRDDSKNSLYLQMN |
| | SLKTEDTAVYYCAREPKYWIDFDLWGRGTLVTVSSGGGGSGGGGSGGGGSDIQM |
| | TQSPSSLSASVGDRVTITCRASQSISSYLNWYQQKPGKAPKLLIYAASSLQSGVPSR |
| | FSGSGSGTDFTLTISSLQPEDFATYYCQQSYIAPYTFGGGTKVEIKHHHHHH (SEQ |
| | ID NO: 178) |
| CDA_(G4S)4 | MAQKRPACTLKPECVQQLLVCSQEAKKSAYCPYSHFPVGAALLTQEGRIFKGCNIE |
| linker_Ab68_ | NACYPLGICAERTAIQKAVSEGYKDFRAIAIASDMQDDFISPCGACRQVMREFGTN |
| HC_(G4S)3_ | WPVYMTKPDGTYIVMTVQELLPSSFGPEDLQKTQGGGGGGGGSGGGGSGGGGS |
| LC_HIS | EVQLVESGGGLVQPGRSLRLSCTASGFTFSDHDMNWVRQAPGKGLEWVGRTRNA |
| | AGSYTTEYAASVKGRFTISRDDSKNSLYLQMNSLKTEDTAVYYCAREPKYWIDFD |
| | LWGRGTLVTSSGGGGSGGGGSGGGGSDIQMTQSPSSLSASVGDRVTITCRASQSISS |
| | YLNWYQQKPGKAPKLLIYAASSLQSGVPSRFSGSGSGTDFTLTISSLQPEDFATYYC |
| | QQSYIAPYTFGGGTKVEIKHHHHHH (SEQ ID NO: 179) |
| CDA_(G4S)4 | MAQKRPACTLKPECVQQLLVCSQEAKKSAYCPYSHFPVGAALLTQEGRIFKGCNIE |
| linker_Ab69_ | NACYPLGICAERTAIQKAVSEGYKDFRAIAIASDMQDDFISPCGACRQVMREFGTN |
| HC_(G4S)3_ | WPVYMTKPDGTYIVMTVQELLPSSFGPEDLQKTQGGGGSGGGGSGGGGSGGGGS |
| LC_HIS | DIQMTQSPSSLSASVGDRVTITCRASQSISSYLNWYQQKPGKAPKLLIYAASSLQSG |
| | VPSRFSGSGSGTDFTLTISSLQPEDFATYYCQQSYIAPYIFGGGTKVEIKGGGGSGGG |
| | GSGGGGSEVQLVESGGGLVQPGGSLRLSCAASGETFVDHDMDWVRQAPGKGLE |
| | WVGRTRNKLGSYTTEYAASVKGRETGRDDSKNSLYLQMNSLKTEDTAVYYCARE |
| | PKYWIDFDLWGRGTLVTVSSHHHHHH (SEQ ID NO: 180) |
| CDA_(G4S)5 | MAQKRPACTLKPECVQQLLVCSQEAKKSAYCPYSHFPVGAALLTQEGRIFKGCNIE |
| linker_Ab58_ | NACYPLGICAERTAIQKAVSEGYKDFRAIAIASDMQDDFISPCGACRQVMREFGTN |
| HC_(G4S)3_ | WPVYMTKPDGTYIVMTVQELLPSSFGPEDLQKTQGGGGSGGGGSGGGGSGGGGS |
| LC_HIS | GGGGSEVQLLESGGGLVQPGGSLRLSCAASGETFSNYAMSWVRQAPGKGLEWVS |
| | AISGSGGSTYYADSVKGRFTISRDNSKNTLYLQMNSLRAEDTAVYYCAKGPPTYH |
| | TNYYYMDVWGKGTTVTVSSGGGGSGGGGSGGGGSDIQMTQSPSSVSASVGDRVT |
| | ITCRASQGISSWLAWYQQKPGKAPKLLLIYAASSLQSGVPSRFSGSGSGTDFTLTISS |
| | LQPEDFATYYCQQTNSFPYTFGGGTKVEIKHHHHHH (SEQ ID NO: 181) |
| CDA_(G4S)5 | MAQKRPACTLKPECVQQLLVCSQEAKKSAYCPYSHFPVGAALLTQEGRIFKGCNIE |
| linker_Ab61_ | NACYPLGICAERTAIQKAVSEGYKDFRAIAIASDMQDDFISPCGACRQVMREFGTN |
| HC_(G4S)3_ | WPVYMTKPDGTYIVMTVQELLPSSFGPEDLQKTQGGGGSGGGGSGGGGSGGGGS |
| LC_HIS | GGGGSEVQLLESGGGLVQPGGSLRLSCAASGETESSYVMIWVRQAPGKGLEWVSS |
| | ISGDSVTTYYADSVKGRFTISRDNSKNTLYLQMNSLRAEDTAVYYCAKGPPTYHT |
| | NYYYMDVWGKGTTVTVSSGGGGSGGGGSGGGGSDIQMTQSPSSVSASVGDRVTI |
| | TCRASQGISSWLAWYQQKPGKAPKLLIYAASSLQQSGVPSRFSGSGSGTDFTLTISS |
| | LQPEDFATYYCQQTNSEPYTFGGGTKVEIKHHHHHH (SEQ ID NO: 182) |
| CDA_(G4S)5 | MAQKRPACTLKPECVQQLLVCSQEAKKSAYCPYSHFPVGAALLTQEGRIFKGCNIE |
| linker_Ab66_ | NACYPLGICAERTAIQKAVSEGYKDFRAIAIASDMQDDFISPCGACRQVMREFGTN |
| HC_(G4S)3_ | WPVYMTKPDGTYIVMTVQELLPSSFGPEDLQKTQGGGGSGGGGSGGGGSGGGGS |
| LC_HIS | GGGGSEVQLVESGGGLVQPGGSLRLSCAASGETFSDHYMDWVRQAPGKGLASGE |
| | TFSDHYMDWVRQAPGKGLEWVGRIRNKASSYTTEYAASVKGRFTISRDDSKNSLY |
| | LQMNSLKTEDTAVYYCAREPKYWIDFDLWGRGTLVTVSSGGGGSGGGGSGGGGS |
| | DIQMTQSPSSLSASVGDRVTITCRASQSISSYLNWYQQKPGKAPKLLIYAASSLQSG |
| | VPSRFSGSGSGTDFTLTISSLQPEDFATYYCQQSYIAPYTFGGGTKVEIKHHHHHH |
| | (SEQ ID NO: 183) |
| CDA_(G4S)5 | MAQKRPACTLKPECVQQLLVCSQEAKKSAYCPYSHFPVGAALLTQEGRIFKGCNIE |
| linker_Ab68_ | NACYPLGICAERTAIQKAVSEGYKDFRAIAIASDMQDDFISPCGACRQVMREFGTN |
| HC_(G4S)3_ | WPVYMTKPDGTYIVMTVQELLPSSFGPEDLQKTQGGGGSGGGGSGGGGSGGGGS |
| LC_HIS | GGGGSEVQLVESGGGLVQPGRSLRLSCTASGFTFSDHDMNWVRQAPGKGLEWVG |
| | RTRNAAGSYTTEYAASVKGRFTISRDDSKNSLYLQMNSLKTEDTAVYYCAREPKY |
| | WIDFDLWGRGTLVTSSGGGGSGGGGSGGGGSDIQMTQSPSSLSASVGDRVTITCRA |
| | SQSISSYLNWYQQKPGKAPKLLIYAASSLQSGVPSRFSGSGSGTDFTLTISSLQPEDF |
| | ATYYCQQSYIAPYTFGGGTKVEIKHHHHHH (SEQ ID NO: 184) |
| CDA_(G4S)5 | MAQKRPACTLKPECVQQLLVCSQEAKKSAYCPYSHFPVGAALLTQEGRIFKGCNIE |
| linker_Ab69_ | NACYPLGICAERTAIQKAVSEGYKDFRAIAIASDMQDDFISPCGACRQVMREFGTN |
| HC_(G4S)3_ | WPVYMTKPDGTYIVMTVQELLPSSFGPEDLQKTQGGGGSGGGGSGGGGSGGGGS |
| LC_HIS | GGGGSDIQMTQSPSSLSASVGDRVTITCRASQSISSYLNWYQQKPGKAPKLLIYAAS |
| | SLQSGVPSRFSGSGSGTDFTLTISSLQPEDFATYYCQQSYIAPYIFGGGTKVEIKGGG |
| | GSGGGGSGGGGSEVQLVESGGGLVQPGGSLRLSCAASGETFVDHDMDWVRQAPG |
| | KGLEWVGRTRNKLGSYTTEYAASVKGRETGRDDSKNSLYLQMNSLKTEDTAVYY |
| | CAREPKYWIDFDLWGRGTLVTVSSHHHHHH (SEQ ID NO: 185) |
| CDA_(G4S)6 | MAQKRPACTLKPECVQQLLVCSQEAKKSAYCPYSHFPVGAALLTQEGRIFKGCNIE |
| linker_Ab58_ | NACYPLGICAERTAIQKAVSEGYKDFRAIAIASDMQDDFISPCGACRQVMREFGTN |
| HC_(G4S)3_ | WPVYMTKPDGTYIVMTVQELLPSSFGPEDLQKTQGGGGSGGGGSGGGGSGGGGS |
| LC_HIS | GGGGSGGGGSEVQLLESGGGLVQPGGSLRLSCAASGETFSNYAMSWVRQAPGKG |
| | LEWVSAISGSGGSTYYADSVKGRFTISRDNSKNTLYLQMNSLRAEDTAVYYCAKG |
| | PPTYHTNYYYMDVWGKGTTVTVSSGGGGSGGGGSGGGGSDIQMTQSPSSVSASV |
| | GDRVTITCRASQGISSWLAWYQQKPGKAPKLLLIYAASSLQSGVPSRFSGSGSGTD |
| | FTLTISSLQPEDFATYYCQQTNSFPYTFGGGTKVEIKHHHHHH (SEQ ID NO: 186) |
| CDA_(G4S)6 | MAQKRPACTLKPECVQQLLVCSQEAKKSAYCPYSHFPVGAALLTQEGRIFKGCNIE |
| linker_Ab61_ | NACYPLGICAERTAIQKAVSEGYKDFRAIAIASDMQDDFISPCGACRQVMREFGTN |
| HC_(G4S)3_ | WPVYMTKPDGTYIVMTVQELLPSSFGPEDLQKTQGGGGSGGGGSGGGGSGGGGS |
| LC_HIS | GGGGSGGGGSEVQLLESGGGLVQPGGSLRLSCAASGETESSYVMIWVRQAPGKGL |
| | EWVSSISGDSVTTYYADSVKGRFTISRDNSKNTLYLQMNSLRAEDTAVYYCAKGP |
| | PTYHTNYYYMDVWGKGTTVTVSSGGGGSGGGGSGGGGSDIQMTQSPSSVSASVG |
| | DRVTITCRASQGISSWLAWYQQKPGKAPKLLIYAASSLQQSGVPSRFSGSGSGTDF |
| | TLTISSLQPEDFATYYCQQTNSEPYTFGGGTKVEIKHHHHHH (SEQ ID NO: 187) |
| CDA_(G4S)6 | MAQKRPACTLKPECVQQLLVCSQEAKKSAYCPYSHFPVGAALLTQEGRIFKGCNIE |
| linker_Ab66_ | NACYPLGICAERTAIQKAVSEGYKDFRAIAIASDMQDDFISPCGACRQVMREFGTN |
| HC_(G4S)3_ | WPVYMTKPDGTYIVMTVQELLPSSFGPEDLQKTQGGGGSGGGGSGGGGSGGGGS |
| LC_HIS | GGGGSGGGGSEVQLVESGGGLVQPGGSLRLSCAASGETFSDHYMDWVRQAPGKG |
| | LASGETFSDHYMDWVRQAPGKGLEWVGRIRNKASSYTTEYAASVKGRFTISRDDS |
| | KNSLYLQMNSLKTEDTAVYYCAREPKYWIDFDLWGRGTLVTVSSGGGGSGGGGS |
| | GGGGSDIQMTQSPSSLSASVGDRVTITCRASQSISSYLNWYQQKPGKAPKLLIYAAS |
| | SLQSGVPSRFSGSGSGTDFTLTISSLQPEDFATYYCQQSYIAPYTFGGGTKVEIKHHH |
| | HHH (SEQ ID NO: 188) |
| CDA_(G4S)6 | MAQKRPACTLKPECVQQLLVCSQEAKKSAYCPYSHFPVGAALLTQEGRIFKGCNIE |
| linker_Ab68_ | NACYPLGICAERTAIQKAVSEGYKDFRAIAIASDMQDDFISPCGACRQVMREFGTN |
| HC_(G4S)3_ | WPVYMTKPDGTYIVMTVQELLPSSFGPEDLQKTQGGGGSGGGGSGGGGSGGGGS |
| LC_HIS | GGGGSGGGGSEVQLVESGGGLVQPGRSLRLSCTASGFTFSDHDMNWVRQAPGKG |
| | LEWVGRTRNAAGSYTTEYAASVKGRFTISRDDSKNSLYLQMNSLKTEDTAVYYC |
| | AREPKYWIDFDLWGRGTLVTSSGGGGSGGGGSGGGGSDIQMTQSPSSLSASVGDR |
| | VTITCRASQSISSYLNWYQQKPGKAPKLLIYAASSLQSGVPSRFSGSGSGTDFTLTIS |
| | SLQPEDFATYYCQQSYIAPYTFGGGTKVEIKHHHHHH (SEQ ID NO: 189) |
| CDA_(G4S)6 | MAQKRPACTLKPECVQQLLVCSQEAKKSAYCPYSHFPVGAALLTQEGRIFKGCNIE |
| linker_Ab69_ | NACYPLGICAERTAIQKAVSEGYKDFRAIAIASDMQDDFISPCGACRQVMREFGTN |
| HC_(G4S)3_ | WPVYMTKPDGTYIVMTVQELLPSSFGPEDLQKTQGGGGSGGGGSGGGGSGGGGS |
| LC_HIS | GGGGSGGGGSDIQMTQSPSSLSASVGDRVTITCRASQSISSYLNWYQQKPGKAPKL |
| | LIYAASSLQSGVPSRFSGSGSGTDFTLTISSLQPEDFATYYCQQSYIAPYIFGGGTKV |
| | EIKGGGGSGGGGSGGGGSEVQLVESGGGLVQPGGSLRLSCAASGETFVDHDMDW |
| | VRQAPGKGLEWVGRTRNKLGSYTTEYAASVKGRETGRDDSKNSLYLQMNSLKTE |
| | DTAVYYCAREPKYWIDFDLWGRGTLVTVSSHHHHHH (SEQ ID NO: 190) |
| CDA_(G4S)7 | MAQKRPACTLKPECVQQLLVCSQEAKKSAYCPYSHFPVGAALLTQEGRIFKGCNIE |
| linker_Ab58_ | NACYPLGICAERTAIQKAVSEGYKDFRAIAIASDMQDDFISPCGACRQVMREFGTN |
| HC_(G4S)3_ | WPVYMTKPDGTYIVMTVQELLPSSFGPEDLQKTQGGGGSGGGGSGGGGSGGGGS |
| LC_HIS | GGGGSGGGGSGGGGSEVQLLESGGGLVQPGGSLRLSCAASGETFSNYAMSWVRQ |
| | APGKGLEWVSAISGSGGSTYYADSVKGRFTISRDNSKNTLYLQMNSLRAEDTAVY |
| | YCAKGPPTYHTNYYYMDVWGKGTTVTVSSGGGGSGGGGSGGGGSDIQMTQSPSS |
| | VSASVGDRVTITCRASQGISSWLAWYQQKPGKAPKLLLIYAASSLQSGVPSRFSGS |
| | GSGTDFTLTISSLQPEDFATYYCQQTNSFPYTFGGGTKVEIKHHHHHH (SEQ ID NO: |
| | 191) |
| CDA_(G4S)7 | MAQKRPACTLKPECVQQLLVCSQEAKKSAYCPYSHFPVGAALLTQEGRIFKGCNIE |
| linker_Ab61_ | NACYPLGICAERTAIQKAVSEGYKDFRAIAIASDMQDDFISPCGACRQVMREFGTN |
| HC_(G4S)3_ | WPVYMTKPDGTYIVMTVQELLPSSFGPEDLQKTQGGGGSGGGGSGGGGSGGGGS |
| LC_HIS | GGGGSGGGGSGGGGSEVQLLESGGGLVQPGGSLRLSCAASGETESSYVMIWVRQA |
| | PGKGLEWVSSISGDSVTTYYADSVKGRFTISRDNSKNTLYLQMNSLRAEDTAVYY |
| | CAKGPPTYHTNYYYMDVWGKGTTVTVSSGGGGSGGGGSGGGGSDIQMTQSPSSV |
| | SASVGDRVTITCRASQGISSWLAWYQQKPGKAPKLLIYAASSLQQSGVPSRFSGSG |
| | SGTDFTLTISSLQPEDFATYYCQQTNSEPYTFGGGTKVEIKHHHHHH (SEQ ID NO: |
| | 192) |
| CDA_(G4S)7 | MAQKRPACTLKPECVQQLLVCSQEAKKSAYCPYSHFPVGAALLTQEGRIFKGCNIE |
| linker_Ab66_ | NACYPLGICAERTAIQKAVSEGYKDFRAIAIASDMQDDFISPCGACRQVMREFGTN |
| HC_(G4S)3_ | WPVYMTKPDGTYIVMTVQELLPSSFGPEDLQKTQGGGGSGGGGSGGGGSGGGGS |
| LC_HIS | GGGGSGGGGSGGGGSEVQLVESGGGLVQPGGSLRLSCAASGETFSDHYMDWVRQ |
| | APGKGLASGETFSDHYMDWVRQAPGKGLEWVGRIRNKASSYTTEYAASVKGRFT |
| | ISRDDSKNSLYLQMNSLKTEDTAVYYCAREPKYWIDFDLWGRGTLVTVSSGGGGS |
| | GGGGSGGGGSDIQMTQSPSSLSASVGDRVTITCRASQSISSYLNWYQQKPGKAPKL |
| | LIYAASSLQSGVPSRFSGSGSGTDFTLTISSLQPEDFATYYCQQSYIAPYTFGGGTKV |
| | EIKHHHHHH (SEQ ID NO: 193) |
| CDA_(G4S)7 | MAQKRPACTLKPECVQQLLVCSQEAKKSAYCPYSHFPVGAALLTQEGRIFKGCNIE |
| linker_Ab68_ | NACYPLGICAERTAIQKAVSEGYKDFRAIAIASDMQDDFISPCGACRQVMREFGTN |
| HC_(G4S)3_ | WPVYMTKPDGTYIVMTVQELLPSSFGPEDLQKTQGGGGSGGGGSGGGGSGGGGS |
| LC_HIS | GGGGSGGGGSGGGGSEVQLVESGGGLVQPGRSLRLSCTASGFTFSDHDMNWVRQ |
| | APGKGLEWVGRTRNAAGSYTTEYAASVKGRFTISRDDSKNSLYLQMNSLKTEDTA |
| | VYYCAREPKYWIDFDLWGRGTLVTSSGGGGSGGGGSGGGGSDIQMTQSPSSLSAS |
| | VGDRVTITCRASQSISSYLNWYQQKPGKAPKLLIYAASSLQSGVPSRFSGSGSGTDF |
| | TLTISSLQPEDFATYYCQQSYIAPYTFGGGTKVEIKHHHHHH (SEQ ID NO: 194) |
| CDA_(G4S)7 | MAQKRPACTLKPECVQQLLVCSQEAKKSAYCPYSHFPVGAALLTQEGRIFKGCNIE |
| linker_Ab69_ | NACYPLGICAERTAIQKAVSEGYKDFRAIAIASDMQDDFISPCGACRQVMREFGTN |
| HC_(G4S)3_ | WPVYMTKPDGTYIVMTVQELLPSSFGPEDLQKTQGGGGSGGGGSGGGGSGGGGS |
| LC_HIS | GGGGSGGGGSGGGGSDIQMTQSPSSLSASVGDRVTITCRASQSISSYLNWYQQKPG |
| | KAPKLLIYAASSLQSGVPSRFSGSGSGTDFTLTISSLQPEDFATYYCQQSYIAPYIFG |
| | GGTKVEIKGGGGGGGGSGGGGSEVQLVESGGGLVQPGGSLRLSCAASGETFVDH |
| | DMDWVRQAPGKGLEWVGRTRNKLGSYTTEYAASVKGRETGRDDSKNSLYLQMN |
| | SLKTEDTAVYYCAREPKYWIDFDLWGRGTLVTVSSHHHHHH (SEQ ID NO: 195) |
| CDA_(G4S)8 | MAQKRPACTLKPECVQQLLVCSQEAKKSAYCPYSHFPVGAALLTQEGRIFKGCNIE |
| linker_Ab58_ | NACYPLGICAERTAIQKAVSEGYKDFRAIAIASDMQDDFISPCGACRQVMREFGTN |
| HC_(G4S)3_ | WPVYMTKPDGTYIVMTVQELLPSSFGPEDLQKTQGGGGSGGGGSGGGGSGGGGS |
| LC_HIS | GGGGSGGGGSGGGGSGGGGSEVQLLESGGGLVQPGGSLRLSCAASGETFSNYAMS |
| | WVRQAPGKGLEWVSAISGSGGSTYYADSVKGRFTISRDNSKNTLYLQMNSLRAED |
| | TAVYYCAKGPPTYHTNYYYMDVWGKGTTVTVSSGGGGSGGGGSGGGGSDIQMT |
| | QSPSSVSASVGDRVTITCRASQGISSWLAWYQQKPGKAPKLLLIYAASSLQSGVPSR |
| | FSGSGSGTDFTLTISSLQPEDFATYYCQQTNSFPYTFGGGTKVEIKHHHHHH (SEQ |
| | ID NO: 196) |
| CDA_(G4S)8 | MAQKRPACTLKPECVQQLLVCSQEAKKSAYCPYSHFPVGAALLTQEGRIFKGCNIE |
| linker_Ab61_ | NACYPLGICAERTAIQKAVSEGYKDFRAIAIASDMQDDFISPCGACRQVMREFGTN |
| HC_(G4S)3_ | WPVYMTKPDGTYIVMTVQELLPSSFGPEDLQKTQGGGGSGGGGSGGGGSGGGGS |
| LC_HIS | GGGGSGGGGSGGGGSGGGGSEVQLLESGGGLVQPGGSLRLSCAASGETESSYVMI |
| | WVRQAPGKGLEWVSSISGDSVTTYYADSVKGRFTISRDNSKNTLYLQMNSLRAED |
| | TAVYYCAKGPPTYHTNYYYMDVWGKGTTVTVSSGGGGGGGGSGGGGSDIQMT |
| | QSPSSVSASVGDRVTITCRASQGISSWLAWYQQKPGKAPKLLIYAASSLQQSGVPS |
| | RFSGSGSGTDFTLTISSLQPEDFATYYCQQTNSEPYTFGGGTKVEIKHHHHHH (SEQ |
| | ID NO: 197) |
| CDA_(G4S)8 | MAQKRPACTLKPECVQQLLVCSQEAKKSAYCPYSHFPVGAALLTQEGRIFKGCNIE |
| linker_Ab66_ | NACYPLGICAERTAIQKAVSEGYKDFRAIAIASDMQDDFISPCGACRQVMREFGTN |
| HC_(G4S)3_ | WPVYMTKPDGTYIVMTVQELLPSSFGPEDLQKTQGGGGSGGGGSGGGGSGGGGS |
| LC_HIS | GGGGSGGGGSGGGGSGGGGSEVQLVESGGGLVQPGGSLRLSCAASGETFSDHYM |
| | DWVRQAPGKGLASGETFSDHYMDWVRQAPGKGLEWVGRIRNKASSYTTEYAAS |
| | VKGRFTISRDDSKNSLYLQMNSLKTEDTAVYYCAREPKYWIDFDLWGRGTLVTVS |
| | SGGGGSGGGGSGGGGSDIQMTQSPSSLSASVGDRVTITCRASQSISSYLNWYQQKP |
| | GKAPKLLIYAASSLQSGVPSRFSGSGSGTDFTLTISSLQPEDFATYYCQQSYIAPYTF |
| | GGGTKVEIKHHHHHH (SEQ ID NO: 198) |
| CDA_(G4S)8 | MAQKRPACTLKPECVQQLLVCSQEAKKSAYCPYSHFPVGAALLTQEGRIFKGCNIE |
| linker_Ab68_ | NACYPLGICAERTAIQKAVSEGYKDFRAIAIASDMQDDFISPCGACRQVMREFGTN |
| HC_(G4S)3_ | WPVYMTKPDGTYIVMTVQELLPSSFGPEDLQKTQGGGGSGGGGSGGGGSGGGGS |
| LC_HIS | GGGGSGGGGSGGGGSGGGGSEVQLVESGGGLVQPGRSLRLSCTASGFTFSDHDM |
| | NWVRQAPGKGLEWVGRTRNAAGSYTTEYAASVKGRFTISRDDSKNSLYLQMNSL |
| | KTEDTAVYYCAREPKYWIDFDLWGRGTLVTSSGGGGSGGGGSGGGGSDIQMTQS |
| | PSSLSASVGDRVTITCRASQSISSYLNWYQQKPGKAPKLLIYAASSLQSGVPSRFSGS |
| | GSGTDFTLTISSLQPEDFATYYCQQSYIAPYTFGGGTKVEIKHHHHHH (SEQ ID NO: |
| | 199) |
| CDA_(G4S)8 | MAQKRPACTLKPECVQQLLVCSQEAKKSAYCPYSHFPVGAALLTQEGRIFKGCNIE |
| linker_Ab69_ | NACYPLGICAERTAIQKAVSEGYKDFRAIAIASDMQDDFISPCGACRQVMREFGTN |
| HC_(G4S)3_ | WPVYMTKPDGTYIVMTVQELLPSSFGPEDLQKTQGGGGSGGGGSGGGGSGGGGS |
| LC_HIS | GGGGSGGGGSGGGGSGGGGSDIQMTQSPSSLSASVGDRVTITCRASQSISSYLNWY |
| | QQKPGKAPKLLIYAASSLQSGVPSRFSGSGSGTDFTLTISSLQPEDFATYYCQQSYIA |
| | PYIFGGGTKVEIKGGGGSGGGGSGGGGSEVQLVESGGGLVQPGGSLRLSCAASGET |
| | FVDHDMDWVRQAPGKGLEWVGRTRNKLGSYTTEYAASVKGRETGRDDSKNSLY |
| | LQMNSLKTEDTAVYYCAREPKYWIDFDLWGRGTLVTVSSHHHHHH (SEQ ID NO: |
| | 200) |
| CDA_(G4S)9 | MAQKRPACTLKPECVQQLLVCSQEAKKSAYCPYSHFPVGAALLTQEGRIFKGCNIE |
| linker_Ab58_ | NACYPLGICAERTAIQKAVSEGYKDFRAIAIASDMQDDFISPCGACRQVMREFGTN |
| HC_(G4S)3_ | WPVYMTKPDGTYIVMTVQELLPSSFGPEDLQKTQGGGGSGGGGSGGGGSGGGGS |
| LC_HIS | GGGGSGGGGSGGGGSGGGGSGGGGSEVQLLESGGGLVQPGGSLRLSCAASGETFS |
| | NYAMSWVRQAPGKGLEWVSAISGSGGSTYYADSVKGRFTISRDNSKNTLYLQMN |
| | SLRAEDTAVYYCAKGPPTYHTNYYYMDVWGKGTTVTVSSGGGGSGGGGSGGGG |
| | SDIQMTQSPSSVSASVGDRVTITCRASQGISSWLAWYQQKPGKAPKLLLIYAASSL |
| | QSGVPSRFSGSGSGTDFTLTISSLQPEDFATYYCQQTNSFPYTFGGGTKVEIKHHHH |
| | HH (SEQ ID NO: 201) |
| CDA_(G4S)9 | MAQKRPACTLKPECVQQLLVCSQEAKKSAYCPYSHFPVGAALLTQEGRIFKGCNIE |
| linker_Ab61_ | NACYPLGICAERTAIQKAVSEGYKDFRAIAIASDMQDDFISPCGACRQVMREFGTN |
| HC_(G4S)3_ | WPVYMTKPDGTYIVMTVQELLPSSFGPEDLQKTQGGGGSGGGGSGGGGSGGGGS |
| LC_HIS | GGGGSGGGGSGGGGSGGGGSGGGGSEVQLLESGGGLVQPGGSLRLSCAASGETES |
| | SYVMIWVRQAPGKGLEWVSSISGDSVTTYYADSVKGRFTISRDNSKNTLYLQMNS |
| | LRAEDTAVYYCAKGPPTYHTNYYYMDVWGKGTTVTVSSGGGGSGGGGSGGGGS |
| | DIQMTQSPSSVSASVGDRVTITCRASQGISSWLAWYQQKPGKAPKLLIYAASSLQQ |
| | SGVPSRFSGSGSGTDFTLTISSLQPEDFATYYCQQTNSEPYTFGGGTKVEIKHHHHH |
| | H (SEQ ID NO: 202) |
| CDA_(G4S)9 | MAQKRPACTLKPECVQQLLVCSQEAKKSAYCPYSHFPVGAALLTQEGRIFKGCNIE |
| linker_Ab66_ | NACYPLGICAERTAIQKAVSEGYKDFRAIAIASDMQDDFISPCGACRQVMREFGTN |
| HC_(G4S)3_ | WPVYMTKPDGTYIVMTVQELLPSSFGPEDLQKTQGGGGSGGGGSGGGGSGGGGS |
| LC_HIS | GGGGSGGGGSGGGGSGGGGSGGGGSEVQLVESGGGLVQPGGSLRLSCAASGETFS |
| | DHYMDWVRQAPGKGLASGETFSDHYMDWVRQAPGKGLEWVGRIRNKASSYTTE |
| | YAASVKGRFTISRDDSKNSLYLQMNSLKTEDTAVYYCAREPKYWIDFDLWGRGTL |
| | VTVSSGGGGSGGGGSGGGGSDIQMTQSPSSLSASVGDRVTITCRASQSISSYLNWY |
| | QQKPGKAPKLLIYAASSLQSGVPSRFSGSGSGTDFTLTISSLQPEDFATYYCQQSYIA |
| | PYTFGGGTKVEIKHHHHHH (SEQ ID NO: 203) |
| CDA_(G4S)9 | MAQKRPACTLKPECVQQLLVCSQEAKKSAYCPYSHFPVGAALLTQEGRIFKGCNIE |
| linker_Ab68_ | NACYPLGICAERTAIQKAVSEGYKDFRAIAIASDMQDDFISPCGACRQVMREFGTN |
| HC_(G4S)3_ | WPVYMTKPDGTYIVMTVQELLPSSFGPEDLQKTQGGGGSGGGGSGGGGSGGGGS |
| LC_HIS | GGGGSGGGGSGGGGSGGGGSGGGGSEVQLVESGGGLVQPGRSLRLSCTASGFTFS |
| | DHDMNWVRQAPGKGLEWVGRTRNAAGSYTTEYAASVKGRFTISRDDSKNSLYLQ |
| | MNSLKTEDTAVYYCAREPKYWIDFDLWGRGTLVTSSGGGGSGGGGSGGGGSDIQ |
| | MTQSPSSLSASVGDRVTITCRASQSISSYLNWYQQKPGKAPKLLIYAASSLQSGVPS |
| | RFSGSGSGTDFTLTISSLQPEDFATYYCQQSYIAPYTFGGGTKVEIKHHHHHH (SEQ |
| | ID NO: 204) |
| CDA_(G4S)9 | MAQKRPACTLKPECVQQLLVCSQEAKKSAYCPYSHFPVGAALLTQEGRIFKGCNIE |
| linker_Ab69_ | NACYPLGICAERTAIQKAVSEGYKDFRAIAIASDMQDDFISPCGACRQVMREFGTN |
| HC_(G4S)3_ | WPVYMTKPDGTYIVMTVQELLPSSFGPEDLQKTQGGGGSGGGGSGGGGSGGGGS |
| LC_HIS | GGGGSGGGGSGGGGSGGGGSGGGGSDIQMTQSPSSLSASVGDRVTITCRASQSISS |
| | YLNWYQQKPGKAPKLLIYAASSLQSGVPSRFSGSGSGTDFTLTISSLQPEDFATYYC |
| | QQSYIAPYIFGGGTKVEIKGGGGSGGGGSGGGGSEVQLVESGGGLVQPGGSLRLSC |
| | AASGETFVDHDMDWVRQAPGKGLEWVGRTRNKLGSYTTEYAASVKGRETGRDD |
| | SKNSLYLQMNSLKTEDTAVYYCAREPKYWIDFDLWGRGTLVTVSSHHHHHH |
| | (SEQ ID NO: 205) |
| CDA_(G4S)10 | MAQKRPACTLKPECVQQLLVCSQEAKKSAYCPYSHFPVGAALLTQEGRIFKGCNIE |
| linker_Ab58_ | NACYPLGICAERTAIQKAVSEGYKDFRAIAIASDMQDDFISPCGACRQVMREFGTN |
| HC_(G4S)3_ | WPVYMTKPDGTYIVMTVQELLPSSFGPEDLQKTQGGGGSGGGGSGGGGSGGGGS |
| LC_HIS | GGGGSGGGGSGGGGSGGGGSGGGGSGGGGSEVQLLESGGGLVQPGGSLRLSCAA |
| | SGETFSNYAMSWVRQAPGKGLEWVSAISGSGGSTYYADSVKGRFTISRDNSKNTL |
| | YLQMNSLRAEDTAVYYCAKGPPTYHTNYYYMDVWGKGTTVTVSSGGGGSGGGG |
| | SGGGGSDIQMTQSPSSVSASVGDRVTITCRASQGISSWLAWYQQKPGKAPKLLLIY |
| | AASSLQSGVPSRFSGSGSGTDFTLTISSLQPEDFATYYCQQTNSFPYTFGGGTKVEIK |
| | HHHHHH (SEQ ID NO: 206) |
| CDA_(G4S)10 | MAQKRPACTLKPECVQQLLVCSQEAKKSAYCPYSHFPVGAALLTQEGRIFKGCNIE |
| linker_Ab61_ | NACYPLGICAERTAIQKAVSEGYKDFRAIAIASDMQDDFISPCGACRQVMREFGTN |
| HC_(G4S)3_ | WPVYMTKPDGTYIVMTVQELLPSSFGPEDLQKTQGGGGSGGGGSGGGGSGGGGS |
| LC_HIS | GGGGSGGGGSGGGGSGGGGSGGGGSGGGGSEVQLLESGGGLVQPGGSLRLSCAA |
| | SGETESSYVMIWVRQAPGKGLEWVSSISGDSVTTYYADSVKGRFTISRDNSKNTLY |
| | LQMNSLRAEDTAVYYCAKGPPTYHTNYYYMDVWGKGTTVTVSSGGGGSGGGGS |
| | GGGGSDIQMTQSPSSVSASVGDRVTITCRASQGISSWLAWYQQKPGKAPKLLIYAA |
| | SSLQQSGVPSRFSGSGSGTDFTLTISSLQPEDFATYYCQQTNSEPYTFGGGTKVEIKH |
| | HHHHH (SEQ ID NO: 207) |
| CDA_(G4S)10 | MAQKRPACTLKPECVQQLLVCSQEAKKSAYCPYSHFPVGAALLTQEGRIFKGCNIE |
| linker_Ab66_ | NACYPLGICAERTAIQKAVSEGYKDFRAIAIASDMQDDFISPCGACRQVMREFGTN |
| HC_(G4S)3_ | WPVYMTKPDGTYIVMTVQELLPSSFGPEDLQKTQGGGGGGGGSGGGGSGGGGS |
| LC_HIS | GGGGSGGGGSGGGGGGGGSGGGGSGGGGSEVQLVESGGGLVQPGGSLRLSCAA |
| | SGETFSDHYMDWVRQAPGKGLASGETFSDHYMDWVRQAPGKGLEWVGRIRNKA |
| | SSYTTEYAASVKGRFTISRDDSKNSLYLQMNSLKTEDTAVYYCAREPKYWIDFDL |
| | WGRGTLVTVSSGGGGGGGGSGGGGSDIQMTQSPSSLSASVGDRVTITCRASQSIS |
| | SYLNWYQQKPGKAPKLLIYAASSLQSGVPSRFSGSGSGTDFTLTISSLQPEDFATYY |
| | CQQSYIAPYTFGGGTKVEIKHHHHHH (SEQ ID NO: 208) |
| CDA_(G4S)10 | MAQKRPACTLKPECVQQLLVCSQEAKKSAYCPYSHFPVGAALLTQEGRIFKGCNIE |
| linker_Ab68_ | NACYPLGICAERTAIQKAVSEGYKDFRAIAIASDMQDDFISPCGACRQVMREFGTN |
| HC_(G4S)3_ | WPVYMTKPDGTYIVMTVQELLPSSFGPEDLQKTQGGGGSGGGGSGGGGSGGGGS |
| LC_HIS | GGGGSGGGGSGGGGSGGGGSGGGGSGGGGSEVQLVESGGGLVQPGRSLRLSCTA |
| | SGFTFSDHDMNWVRQAPGKGLEWVGRTRNAAGSYTTEYAASVKGRFTISRDDSK |
| | NSLYLQMNSLKTEDTAVYYCAREPKYWIDFDLWGRGTLVTSSGGGGSGGGGSGG |
| | GGSDIQMTQSPSSLSASVGDRVTITCRASQSISSYLNWYQQKPGKAPKLLIYAASSL |
| | QSGVPSRFSGSGSGTDFTLTISSLQPEDFATYYCQQSYIAPYTFGGGTKVEIKHHHH |
| | HH (SEQ ID NO: 209) |
| CDA_(G4S)10 | MAQKRPACTLKPECVQQLLVCSQEAKKSAYCPYSHFPVGAALLTQEGRIFKGCNIE |
| linker_Ab69_ | NACYPLGICAERTAIQKAVSEGYKDFRAIAIASDMQDDFISPCGACRQVMREFGTN |
| HC_(G4S)3_ | WPVYMTKPDGTYIVMTVQELLPSSFGPEDLQKTQGGGGSGGGGSGGGGSGGGGS |
| LC_HIS | GGGGSGGGGSGGGGSGGGGSGGGGSGGGGSDIQMTQSPSSLSASVGDRVTITCRA |
| | SQSISSYLNWYQQKPGKAPKLLIYAASSLQSGVPSRFSGSGSGTDFTLTISSLQPEDF |
| | ATYYCQQSYIAPYIFGGGTKVEIKGGGGSGGGGSGGGGSEVQLVESGGGLVQPGG |
| | SLRLSCAASGETFVDHDMDWVRQAPGKGLEWVGRTRNKLGSYTTEYAASVKGRE |
| | TGRDDSKNSLYLQMNSLKTEDTAVYYCAREPKYWIDFDLWGRGTLVTVSSHHHH |
| | HH (SEQ ID NO: 210) |
| CDA_(G4S)11 | MAQKRPACTLKPECVQQLLVCSQEAKKSAYCPYSHFPVGAALLTQEGRIFKGCNIE |
| linker_Ab58_ | NACYPLGICAERTAIQKAVSEGYKDFRAIAIASDMQDDFISPCGACRQVMREFGTN |
| HC_(G4S)3_ | WPVYMTKPDGTYIVMTVQELLPSSFGPEDLQKTQGGGGSGGGGSGGGGSGGGGS |
| LC_HIS | GGGGSGGGGSGGGGSGGGGSGGGGSGGGGSGGGGSEVQLLESGGGLVQPGGSLR |
| | LSCAASGETFSNYAMSWVRQAPGKGLEWVSAISGSGGSTYYADSVKGRFTISRDN |
| | SKNTLYLQMNSLRAEDTAVYYCAKGPPTYHTNYYYMDVWGKGTTVTVSSGGGG |
| | SGGGGSGGGGSDIQMTQSPSSVSASVGDRVTITCRASQGISSWLAWYQQKPGKAP |
| | KLLLIYAASSLQSGVPSRFSGSGSGTDFTLTISSLQPEDFATYYCQQTNSFPYTFGGG |
| | TKVEIKHHHHHH (SEQ ID NO: 211) |
| CDA_(G4S)11 | MAQKRPACTLKPECVQQLLVCSQEAKKSAYCPYSHFPVGAALLTQEGRIFKGCNIE |
| linker_Ab61_ | NACYPLGICAERTAIQKAVSEGYKDFRAIAIASDMQDDFISPCGACRQVMREFGTN |
| HC_(G4S)3_ | WPVYMTKPDGTYIVMTVQELLPSSFGPEDLQKTQGGGGSGGGGSGGGGSGGGGS |
| LC_HIS | GGGGSGGGGSGGGGSGGGGSGGGGSGGGGSGGGGSEVQLLESGGGLVQPGGSLR |
| | LSCAASGETESSYVMIWVRQAPGKGLEWVSSISGDSVTTYYADSVKGRFTISRDNS |
| | KNTLYLQMNSLRAEDTAVYYCAKGPPTYHTNYYYMDVWGKGTTVTVSSGGGGS |
| | GGGGSGGGGSDIQMTQSPSSVSASVGDRVTITCRASQGISSWLAWYQQKPGKAPK |
| | LLIYAASSLQQSGVPSRFSGSGSGTDFTLTISSLQPEDFATYYCQQTNSEPYTFGGGT |
| | KVEIKHHHHHH (SEQ ID NO: 212) |
| CDA_(G4S)11 | MAQKRPACTLKPECVQQLLVCSQEAKKSAYCPYSHFPVGAALLTQEGRIFKGCNIE |
| linker_Ab66_ | NACYPLGICAERTAIQKAVSEGYKDFRAIAIASDMQDDFISPCGACRQVMREFGTN |
| HC_(G4S)3_ | WPVYMTKPDGTYIVMTVQELLPSSFGPEDLQKTQGGGGSGGGGSGGGGSGGGGS |
| LC_HIS | GGGGSGGGGSGGGGSGGGGSGGGGSGGGGSGGGGSEVQLVESGGGLVQPGGSLR |
| | LSCAASGETFSDHYMDWVRQAPGKGLASGETFSDHYMDWVRQAPGKGLEWVGR |
| | IRNKASSYTTEYAASVKGRFTISRDDSKNSLYLQMNSLKTEDTAVYYCAREPKYWI |
| | DFDLWGRGTLVTVSSGGGGSGGGGSGGGGSDIQMTQSPSSLSASVGDRVTITCRAS |
| | QSISSYLNWYQQKPGKAPKLLIYAASSLQSGVPSRFSGSGSGTDFTLTISSLQPEDFA |
| | TYYCQQSYIAPYTFGGGTKVEIKHHHHHH (SEQ ID NO: 213) |
| CDA_(G4S)11 | MAQKRPACTLKPECVQQLLVCSQEAKKSAYCPYSHFPVGAALLTQEGRIFKGCNIE |
| linker_Ab68_ | NACYPLGICAERTAIQKAVSEGYKDFRAIAIASDMQDDFISPCGACRQVMREFGTN |
| HC_(G4S)3_ | WPVYMTKPDGTYIVMTVQELLPSSFGPEDLQKTQGGGGSGGGGSGGGGSGGGGS |
| LC_HIS | GGGGSGGGGSGGGGSGGGGSGGGGSGGGGSGGGGSEVQLVESGGGLVQPGRSLR |
| | LSCTASGFTFSDHDMNWVRQAPGKGLEWVGRTRNAAGSYTTEYAASVKGRFTIS |
| | RDDSKNSLYLQMNSLKTEDTAVYYCAREPKYWIDFDLWGRGTLVTSSGGGGSGG |
| | GGSGGGGSDIQMTQSPSSLSASVGDRVTITCRASQSISSYLNWYQQKPGKAPKLLIY |
| | AASSLQSGVPSRFSGSGSGTDFTLTISSLQPEDFATYYCQQSYIAPYTFGGGTKVEIK |
| | HHHHHH (SEQ ID NO: 214) |
| CDA_(G4S)11 | MAQKRPACTLKPECVQQLLVCSQEAKKSAYCPYSHFPVGAALLTQEGRIFKGCNIE |
| linker_Ab69_ | NACYPLGICAERTAIQKAVSEGYKDFRAIAIASDMQDDFISPCGACRQVMREFGTN |
| HC_(G4S)3_ | WPVYMTKPDGTYIVMTVQELLPSSFGPEDLQKTQGGGGSGGGGSGGGGSGGGGS |
| LC_HIS | GGGGSGGGGSGGGGSGGGGSGGGGSGGGGSGGGGSDIQMTQSPSSLSASVGDRV |
| | TITCRASQSISSYLNWYQQKPGKAPKLLIYAASSLQSGVPSRFSGSGSGTDFTLTISS |
| | LQPEDFATYYCQQSYIAPYIFGGGTKVEIKGGGGSGGGGSGGGGSEVQLVESGGGL |
| | VQPGGSLRLSCAASGETFVDHDMDWVRQAPGKGLEWVGRTRNKLGSYTTEYAAS |
| | VKGRETGRDDSKNSLYLQMNSLKTEDTAVYYCAREPKYWIDFDLWGRGTLVTVS |
| | SHHHHHH (SEQ ID NO: 215) |
| CDA_(G4S)112 | MAQKRPACTLKPECVQQLLVCSQEAKKSAYCPYSHFPVGAALLTQEGRIFKGCNIE |
| linker_Ab58_ | NACYPLGICAERTAIQKAVSEGYKDFRAIAIASDMQDDFISPCGACRQVMREFGTN |
| HC_(G4S)3_ | WPVYMTKPDGTYIVMTVQELLPSSFGPEDLQKTQGGGGSGGGGSGGGGSGGGGS |
| LC_HIS | GGGGSGGGGSGGGGSGGGGSGGGGSGGGGSGGGGSGGGGSEVQLLESGGGLVQP |
| | GGSLRLSCAASGETFSNYAMSWVRQAPGKGLEWVSAISGSGGSTYYADSVKGRFT |
| | ISRDNSKNTLYLQMNSLRAEDTAVYYCAKGPPTYHTNYYYMDVWGKGTTVTVSS |
| | GGGGSGGGGSGGGGSDIQMTQSPSSVSASVGDRVTITCRASQGISSWLAWYQQKP |
| | GKAPKLLLIYAASSLQSGVPSRFSGSGSGTDFTLTISSLQPEDFATYYCQQTNSFPYT |
| | FGGGTKVEIKHHHHHH (SEQ ID NO: 216) |
| CDA_(G4S)112 | MAQKRPACTLKPECVQQLLVCSQEAKKSAYCPYSHFPVGAALLTQEGRIFKGCNIE |
| linker_Ab61_ | NACYPLGICAERTAIQKAVSEGYKDFRAIAIASDMQDDFISPCGACRQVMREFGTN |
| HC_(G4S)3_ | WPVYMTKPDGTYIVMTVQELLPSSFGPEDLQKTQGGGGSGGGGSGGGGSGGGGS |
| LC_HIS | GGGGSGGGGSGGGGSGGGGSGGGGSGGGGSGGGGSGGGGSEVQLLESGGGLVQP |
| | GGSLRLSCAASGETESSYVMIWVRQAPGKGLEWVSSISGDSVTTYYADSVKGRFTI |
| | SRDNSKNTLYLQMNSLRAEDTAVYYCAKGPPTYHTNYYYMDVWGKGTTVTVSS |
| | GGGGSGGGGSGGGGSDIQMTQSPSSVSASVGDRVTITCRASQGISSWLAWYQQKP |
| | GKAPKLLIYAASSLQQSGVPSRFSGSGSGTDFTLTISSLQPEDFATYYCQQTNSEPYT |
| | FGGGTKVEIKHHHHHH (SEQ ID NO: 217) |
| CDA_(G4S)112 | MAQKRPACTLKPECVQQLLVCSQEAKKSAYCPYSHFPVGAALLTQEGRIFKGCNIE |
| linker_Ab66_ | NACYPLGICAERTAIQKAVSEGYKDFRAIAIASDMQDDFISPCGACRQVMREFGTN |
| HC_(G4S)3_ | WPVYMTKPDGTYIVMTVQELLPSSFGPEDLQKTQGGGGSGGGGSGGGGSGGGGS |
| LC_HIS | GGGGSGGGGSGGGGSGGGGSGGGGSGGGGSGGGGSGGGGSEVQLVESGGGLVQ |
| | PGGSLRLSCAASGETFSDHYMDWVRQAPGKGLASGETFSDHYMDWVRQAPGKG |
| | LEWVGRIRNKASSYTTEYAASVKGRFTISRDDSKNSLYLQMNSLKTEDTAVYYCA |
| | REPKYWIDFDLWGRGTLVTVSSGGGGSGGGGSGGGGSDIQMTQSPSSLSASVGDR |
| | VTITCRASQSISSYLNWYQQKPGKAPKLLIYAASSLQSGVPSRFSGSGSGTDFTLTIS |
| | SLQPEDFATYYCQQSYIAPYTFGGGTKVEIKHHHHHH (SEQ ID NO: 218) |
| CDA_(G4S)112 | MAQKRPACTLKPECVQQLLVCSQEAKKSAYCPYSHFPVGAALLTQEGRIFKGCNIE |
| linker_Ab68_ | NACYPLGICAERTAIQKAVSEGYKDFRAIAIASDMQDDFISPCGACRQVMREFGTN |
| HC_(G4S)3_ | WPVYMTKPDGTYIVMTVQELLPSSFGPEDLQKTQGGGGSGGGGSGGGGSGGGGS |
| LC_HIS | GGGGSGGGGSGGGGSGGGGSGGGGSGGGGSGGGGSGGGGSEVQLVESGGGLVQ |
| | PGRSLRLSCTASGFTFSDHDMNWVRQAPGKGLEWVGRTRNAAGSYTTEYAASVK |
| | GRFTISRDDSKNSLYLQMNSLKTEDTAVYYCAREPKYWIDFDLWGRGTLVTSSGG |
| | GGSGGGGSGGGGSDIQMTQSPSSLSASVGDRVTITCRASQSISSYLNWYQQKPGKA |
| | PKLLIYAASSLQSGVPSRFSGSGSGTDFTLTISSLQPEDFATYYCQQSYIAPYTFGGG |
| | TKVEIKHHHHHH (SEQ ID NO: 219) |
| CDA_(G4S)112 | MAQKRPACTLKPECVQQLLVCSQEAKKSAYCPYSHFPVGAALLTQEGRIFKGCNIE |
| linker_Ab69_ | NACYPLGICAERTAIQKAVSEGYKDFRAIAIASDMQDDFISPCGACRQVMREFGTN |
| HC_(G4S)3_ | WPVYMTKPDGTYIVMTVQELLPSSFGPEDLQKTQGGGGSGGGGSGGGGSGGGGS |
| LC_HIS | GGGGSGGGGSGGGGSGGGGSGGGGSGGGGSGGGGSGGGGSDIQMTQSPSSLSAS |
| | VGDRVTITCRASQSISSYLNWYQQKPGKAPKLLIYAASSLQSGVPSRFSGSGSGTDF |
| | TLTISSLQPEDFATYYCQQSYIAPYIFGGGTKVEIKGGGGSGGGGSGGGGSEVQLVE |
| | SGGGLVQPGGSLRLSCAASGETFVDHDMDWVRQAPGKGLEWVGRTRNKLGSYTT |
| | EYAASVKGRETGRDDSKNSLYLQMNSLKTEDTAVYYCAREPKYWIDFDLWGRGT |
| | LVTVSSHHHHHH (SEQ ID NO: 220) |
| Ab58_LC_ | DIQMTQSPSSVSASVGDRVTITCRASQGISSWLAWYQQKPGKAPKLLLIYAASSLQ |
| (G4S)3_HC_G4S | SGVPSRFSGSGSGTDFTLTISSLQPEDFATYYCQQTNSFPYTFGGGTKVEIKGGGGS |
| linker_CDA_ | GGGGSGGGGSEVQLLESGGGLVQPGGSLRLSCAASGETFSNYAMSWVRQAPGKG |
| | LEWVSAISGSGGSTYYADSVKGRFTISRDNSKNTLYLQMNSLRAEDTAVYYCAKG |
| | PPTYHTNYYYMDVWGKGTTVTVSSGGGGSMAQKRPACTLKPECVQQLLVCSQEA |
| | KKSAYCPYSHFPVGAALLTQEGRIFKGCNIENACYPLGICAERTAIQKAVSEGYKDF |
| | RAIAIASDMQDDFISPCGACRQVMREFGTNWPVYMTKPDGTYIVMTVQELLPSSFG |
| | PEDLQKTQ (SEQ ID NO: 221) |
| Ab58_LC_ | DIQMTQSPSSVSASVGDRVTITCRASQGISSWLAWYQQKPGKAPKLLLIYAASSLQ |
| (G4S)3_HC_ | SGVPSRFSGSGSGTDFTLTISSLQPEDFATYYCQQTNSFPYTFGGGTKVEIKGGGGS |
| (G4S)3 linker_ | GGGGSGGGGSEVQLLESGGGLVQPGGSLRLSCAASGETFSNYAMSWVRQAPGKG |
| CDA | LEWVSAISGSGGSTYYADSVKGRFTISRDNSKNTLYLQMNSLRAEDTAVYYCAKG |
| | PPTYHTNYYYMDVWGKGTTVTVSSGGGGSGGGGSGGGGSMAQKRPACTLKPEC |
| | VQQLLVCSQEAKKSAYCPYSHFPVGAALLTQEGRIFKGCNIENACYPLGICAERTAI |
| | QKAVSEGYKDFRAIAIASDMQDDFISPCGACRQVMREFGTNWPVYMTKPDGTYIV |
| | MTVQELLPSSFGPEDLQKTQ (SEQ ID NO: 222) |
| Ab58_LC_ | DIQMTQSPSSVSASVGDRVTITCRASQGISSWLAWYQQKPGKAPKLLLIYAASSLQ |
| (G4S)3_HC_ | SGVPSRFSGSGSGTDFTLTISSLQPEDFATYYCQQTNSFPYTFGGGTKVEIKGGGGS |
| (G4S)4 linker_ | GGGGSGGGGSEVQLLESGGGLVQPGGSLRLSCAASGETFSNYAMSWVRQAPGKG |
| CDA | LEWVSAISGSGGSTYYADSVKGRFTISRDNSKNTLYLQMNSLRAEDTAVYYCAKG |
| | PPTYHTNYYYMDVWGKGTTVTVSSGGGGGGGGSGGGGSGGGGSMAQKRPACT |
| | LKPECVQQLLVCSQEAKKSAYCPYSHFPVGAALLTQEGRIFKGCNIENACYPLGIC |
| | AERTAIQKAVSEGYKDFRAIAIASDMQDDFISPCGACRQVMREFGTNWPVYMTKP |
| | DGTYIVMTVQELLPSSFGPEDLQKTQ (SEQ ID NO: 223) |
| Ab58_LC_ | DIQMTQSPSSVSASVGDRVTITCRASQGISSWLAWYQQKPGKAPKLLLIYAASSLQ |
| (G4S)3_HC_ | SGVPSRFSGSGSGTDFTLTISSLQPEDFATYYCQQTNSFPYTFGGGTKVEIKGGGGS |
| (G4S)5 linker_ | GGGGSGGGGSEVQLLESGGGLVQPGGSLRLSCAASGETFSNYAMSWVRQAPGKG |
| CDA | LEWVSAISGSGGSTYYADSVKGRFTISRDNSKNTLYLQMNSLRAEDTAVYYCAKG |
| | PPTYHTNYYYMDVWGKGTTVTVSSGGGGSGGGGSGGGGSGGGGSGGGGSMAQK |
| | RPACTLKPECVQQLLVCSQEAKKSAYCPYSHFPVGAALLTQEGRIFKGCNIENACY |
| | PLGICAERTAIQKAVSEGYKDFRAIAIASDMQDDFISPCGACRQVMREFGTNWPVY |
| | MTKPDGTYIVMTVQELLPSSFGPEDLQKTQ (SEQ ID NO: 224) |
| Ab58_LC_ | DIQMTQSPSSVSASVGDRVTITCRASQGISSWLAWYQQKPGKAPKLLLIYAASSLQ |
| (G4S)3_HC_ | SGVPSRFSGSGSGTDFTLTISSLQPEDFATYYCQQTNSFPYTFGGGTKVEIKGGGGS |
| (G4S)6 linker_ | GGGGSGGGGSEVQLLESGGGLVQPGGSLRLSCAASGETFSNYAMSWVRQAPGKG |
| CDA | LEWVSAISGSGGSTYYADSVKGRFTISRDNSKNTLYLQMNSLRAEDTAVYYCAKG |
| | PPTYHTNYYYMDVWGKGTTVTVSSGGGGSGGGGSGGGGSGGGGSGGGGSGGGG |
| | SMAQKRPACTLKPECVQQLLVCSQEAKKSAYCPYSHFPVGAALLTQEGRIFKGCNI |
| | ENACYPLGICAERTAIQKAVSEGYKDFRAIAIASDMQDDFISPCGACRQVMREFGT |
| | NWPVYMTKPDGTYIVMTVQELLPSSFGPEDLQKTQ (SEQ ID NO: 225) |
| Ab58_LC_ | DIQMTQSPSSVSASVGDRVTITCRASQGISSWLAWYQQKPGKAPKLLLIYAASSLQ |
| (G4S)3_HC_ | SGVPSRFSGSGSGTDFTLTISSLQPEDFATYYCQQTNSFPYTFGGGTKVEIKGGGGS |
| (G4S)7 linker_ | GGGGSGGGGSEVQLLESGGGLVQPGGSLRLSCAASGETFSNYAMSWVRQAPGKG |
| CDA | LEWVSAISGSGGSTYYADSVKGRFTISRDNSKNTLYLQMNSLRAEDTAVYYCAKG |
| | PPTYHTNYYYMDVWGKGTTVTVSSGGGGSGGGGSGGGGSGGGGSGGGGSGGGG |
| | SGGGGSMAQKRPACTLKPECVQQLLVCSQEAKKSAYCPYSHFPVGAALLTQEGRI |
| | FKGCNIENACYPLGICAERTAIQKAVSEGYKDFRAIAIASDMQDDFISPCGACRQV |
| | [sequence omitted] (SEQ ID NO: 226) |
| Ab58_LC_ | DIQMTQSPSSVSASVGDRVTITCRASQGISSWLAWYQQKPGKAPKLLLIYAASSLQ |
| (G4S)3_HC_ | SGVPSRFSGSGSGTDFTLTISSLQPEDFATYYCQQTNSFPYTFGGGTKVEIKGGGGS |
| (G4S)8 linker_ | GGGGSGGGGSEVQLLESGGGLVQPGGSLRLSCAASGETFSNYAMSWVRQAPGKG |
| CDA | LEWVSAISGSGGSTYYADSVKGRFTISRDNSKNTLYLQMNSLRAEDTAVYYCAKG |
| | PPTYHTNYYYMDVWGKGTTVTVSSGGGGSGGGGSGGGGSGGGGSGGGGSGGGG |
| | SGGGGSGGGGSMAQKRPACTLKPECVQQLLVCSQEAKKSAYCPYSHFPVGAALLT |
| | QEGRIFKGCNIENACYPLGICAERTAIQKAVSEGYKDFRAIAIASDMQDDFISPCGA |
| | CRQVMREFGTNWPVYMTKPDGTYIVMTVQELLPSSFGPEDLQKTQ (SEQ ID NO: |
| | 227) |
| Ab58_LC_ | DIQMTQSPSSVSASVGDRVTITCRASQGISSWLAWYQQKPGKAPKLLLIYAASSLQ |
| (G4S)3_HC_ | SGVPSRFSGSGSGTDFTLTISSLQPEDFATYYCQQTNSFPYTFGGGTKVEIKGGGGS |
| (G4S)9 linker_ | GGGGSGGGGSEVQLLESGGGLVQPGGSLRLSCAASGETFSNYAMSWVRQAPGKG |
| CDA | LEWVSAISGSGGSTYYADSVKGRFTISRDNSKNTLYLQMNSLRAEDTAVYYCAKG |
| | PPTYHTNYYYMDVWGKGTTVTVSSGGGGSGGGGSGGGGSGGGGSGGGGSGGGG |
| | SGGGGSGGGGSGGGGSMAQKRPACTLKPECVQQLLVCSQEAKKSAYCPYSHFPV |
| | GAALLTQEGRIFKGCNIENACYPLGICAERTAIQKAVSEGYKDFRAIAIASDMQDDF |
| | ISPCGACRQVMREFGTNWPVYMTKPDGTYIVMTVQELLPSSFGPEDLQKTQ (SEQ |
| | ID NO: 228) |
| Ab58_LC_ | DIQMTQSPSSVSASVGDRVTITCRASQGISSWLAWYQQKPGKAPKLLLIYAASSLQ |
| (G4S)3_HC_ | SGVPSRFSGSGSGTDFTLTISSLQPEDFATYYCQQTNSFPYTFGGGTKVEIKGGGGS |
| (G4S)10 | GGGGSGGGGSEVQLLESGGGLVQPGGSLRLSCAASGETFSNYAMSWVRQAPGKG |
| linker_CDA | LEWVSAISGSGGSTYYADSVKGRFTISRDNSKNTLYLQMNSLRAEDTAVYYCAKG |
| | PPTYHTNYYYMDVWGKGTTVTVSSGGGGSGGGGSGGGGSGGGGSGGGGSGGGG |
| | SGGGGSGGGGSGGGGSGGGGSMAQKRPACTLKPECVQQLLVCSQEAKKSAYCPY |
| | SHFPVGAALLTQEGRIFKGCNIENACYPLGICAERTAIQKAVSEGYKDFRAIAIASD |
| | MQDDFISPCGACRQVMREFGTNWPVYMTKPDGTYIVMTVQELLPSSFGPEDLQKT |
| | Q (SEQ ID NO: 229) |
| Ab58_LC_ | DIQMTQSPSSVSASVGDRVTITCRASQGISSWLAWYQQKPGKAPKLLLIYAASSLQ |
| (G4S)3_HC_ | SGVPSRFSGSGSGTDFTLTISSLQPEDFATYYCQQTNSFPYTFGGGTKVEIKGGGGS |
| (G4S)11 | GGGGSGGGGSEVQLLESGGGLVQPGGSLRLSCAASGETFSNYAMSWVRQAPGKG |
| linker_CDA | LEWVSAISGSGGSTYYADSVKGRFTISRDNSKNTLYLQMNSLRAEDTAVYYCAKG |
| | PPTYHTNYYYMDVWGKGTTVTVSSGGGGSGGGGSGGGGSGGGGSGGGGSGGGG |
| | SGGGGSGGGGSGGGGSGGGGSGGGGSMAQKRPACTLKPECVQQLLVCSQEAKKS |
| | AYCPYSHFPVGAALLTQEGRIFKGCNIENACYPLGICAERTAIQKAVSEGYKDFRAI |
| | AIASDMQDDFISPCGACRQVMREFGTNWPVYMTKPDGTYIVMTVQELLPSSFGPE |
| | DLQKTQ (SEQ ID NO: 230) |
| Ab58_LC_ | DIQMTQSPSSVSASVGDRVTITCRASQGISSWLAWYQQKPGKAPKLLLIYAASSLQ |
| (G4S)3_HC_ | SGVPSRFSGSGSGTDFTLTISSLQPEDFATYYCQQTNSFPYTFGGGTKVEIKGGGGS |
| (G4S)112 | GGGGSGGGGSEVQLLESGGGLVQPGGSLRLSCAASGETFSNYAMSWVRQAPGKG |
| linker_CDA | LEWVSAISGSGGSTYYADSVKGRFTISRDNSKNTLYLQMNSLRAEDTAVYYCAKG |
| | PPTYHTNYYYMDVWGKGTTVTVSSGGGGSGGGGSGGGGSGGGGSGGGGSGGGG |
| | SGGGGSGGGGSGGGGSGGGGSGGGGSGGGGSMAQKRPACTLKPECVQQLLVCSQ |
| | EAKKSAYCPYSHFPVGAALLTQEGRIFKGCNIENACYPLGICAERTAIQKAVSEGY |
| | KDFRAIAIASDMQDDFISPCGACRQVMREFGTNWPVYMTKPDGTYIVMTVQELLP |
| | SSFGPEDLQKTQ (SEQ ID NO: 231) |
| Ab61_LC_ | DIQMTQSPSSVSASVGDRVTITCRASQGISSWLAWYQQKPGKAPKLLIYAASSLQQ |
| (G4S)3_HC_G4S | SGVPSRFSGSGSGTDFTLTISSLQPEDFATYYCQQTNSEPYTFGGGTKVEIKGGGGS |
| linker_CDA | GGGGSGGGGSEVQLLESGGGLVQPGGSLRLSCAASGETESSYVMIWVRQAPGKGL |
| | EWVSSISGDSVTTYYADSVKGRFTISRDNSKNTLYLQMNSLRAEDTAVYYCAKGP |
| | PTYHTNYYYMDVWGKGTTVTVSSGGGGSMAQKRPACTLKPECVQQLLVCSQEA |
| | KKSAYCPYSHFPVGAALLTQEGRIFKGCNIENACYPLGICAERTAIQKAVSEGYKDF |
| | RAIAIASDMQDDFISPCGACRQVMREFGTNWPVYMTKPDGTYIVMTVQELLPSSFG |
| | PEDLQKTQ (SEQ ID NO: 232) |
| Ab61_LC_ | DIQMTQSPSSVSASVGDRVTITCRASQGISSWLAWYQQKPGKAPKLLIYAASSLQQ |
| (G4S)3_HC_ | SGVPSRFSGSGSGTDFTLTISSLQPEDFATYYCQQTNSEPYTFGGGTKVEIKGGGGS |
| (G4S)3 linker_ | GGGGSGGGGSEVQLLESGGGLVQPGGSLRLSCAASGETESSYVMIWVRQAPGKGL |
| CDA | EWVSSISGDSVTTYYADSVKGRFTISRDNSKNTLYLQMNSLRAEDTAVYYCAKGP |
| | PTYHTNYYYMDVWGKGTTVTVSSGGGGSGGGGSGGGGSMAQKRPACTLKPECV |
| | QQLLVCSQEAKKSAYCPYSHFPVGAALLTQEGRIFKGCNIENACYPLGICAERTAIQ |
| | KAVSEGYKDFRAIAIASDMQDDFISPCGACRQVMREFGTNWPVYMTKPDGTYIVM |
| | TVQELLPSSFGPEDLQKTQ (SEQ ID NO: 233) |
| Ab61_LC_ | DIQMTQSPSSVSASVGDRVTITCRASQGISSWLAWYQQKPGKAPKLLIYAASSLQQ |
| (G4S)3_HC_ | SGVPSRFSGSGSGTDFTLTISSLQPEDFATYYCQQTNSEPYTFGGGTKVEIKGGGGS |
| (G4S)4 linker_ | GGGGSGGGGSEVQLLESGGGLVQPGGSLRLSCAASGETESSYVMIWVRQAPGKGL |
| CDA | EWVSSISGDSVTTYYADSVKGRFTISRDNSKNTLYLQMNSLRAEDTAVYYCAKGP |
| | PTYHTNYYYMDVWGKGTTVTVSSGGGGSGGGGSGGGGSGGGGSMAQKRPACTL |
| | KPECVQQLLVCSQEAKKSAYCPYSHFPVGAALLTQEGRIFKGCNIENACYPLGICA |
| | ERTAIQKAVSEGYKDFRAIAIASDMQDDFISPCGACRQVMREFGTNWPVYMTKPD |
| | GTYIVMTVQELLPSSFGPEDLQKTQ (SEQ ID NO: 234) |
| Ab61_LC_ | DIQMTQSPSSVSASVGDRVTITCRASQGISSWLAWYQQKPGKAPKLLIYAASSLQQ |
| (G4S)3_HC_ | SGVPSRFSGSGSGTDFTLTISSLQPEDFATYYCQQTNSEPYTFGGGTKVEIKGGGGS |
| (G4S)5 linker_ | GGGGSGGGGSEVQLLESGGGLVQPGGSLRLSCAASGETESSYVMIWVRQAPGKGL |
| CDA | EWVSSISGDSVTTYYADSVKGRFTISRDNSKNTLYLQMNSLRAEDTAVYYCAKGP |
| | PTYHTNYYYMDVWGKGTTVTVSSGGGGSGGGGSGGGGSGGGGSGGGGSMAQK |
| | RPACTLKPECVQQLLVCSQEAKKSAYCPYSHFPVGAALLTQEGRIFKGCNIENACY |
| | PLGICAERTAIQKAVSEGYKDFRAIAIASDMQDDFISPCGACRQVMREFGTNWPVY |
| | MTKPDGTYIVMTVQELLPSSFGPEDLQKTQ (SEQ ID NO: 235) |
| Ab61_LC_ | DIQMTQSPSSVSASVGDRVTITCRASQGISSWLAWYQQKPGKAPKLLIYAASSLQQ |
| (G4S)3_HC_ | SGVPSRFSGSGSGTDFTLTISSLQPEDFATYYCQQTNSEPYTFGGGTKVEIKGGGGS |
| (G4S)6 linker_ | GGGGSGGGGSEVQLLESGGGLVQPGGSLRLSCAASGETESSYVMIWVRQAPGKGL |
| CDA | EWVSSISGDSVTTYYADSVKGRFTISRDNSKNTLYLQMNSLRAEDTAVYYCAKGP |
| | PTYHTNYYYMDVWGKGTTVTVSSGGGGSGGGGSGGGGSGGGGSGGGGSGGGGS |
| | MAQKRPACTLKPECVQQLLVCSQEAKKSAYCPYSHFPVGAALLTQEGRIFKGCNIE |
| | NACYPLGICAERTAIQKAVSEGYKDFRAIAIASDMQDDFISPCGACRQVMREFGTN |
| | WPVYMTKPDGTYIVMTVQELLPSSFGPEDLQKTQ (SEQ ID NO: 236) |
| Ab61_LC_ | DIQMTQSPSSVSASVGDRVTITCRASQGISSWLAWYQQKPGKAPKLLIYAASSLQQ |
| (G4S)3_HC_ | SGVPSRFSGSGSGTDFTLTISSLQPEDFATYYCQQTNSEPYTFGGGTKVEIKGGGGS |
| (G4S)7 linker_ | GGGGSGGGGSEVQLLESGGGLVQPGGSLRLSCAASGETESSYVMIWVRQAPGKGL |
| CDA | EWVSSISGDSVTTYYADSVKGRFTISRDNSKNTLYLQMNSLRAEDTAVYYCAKGP |
| | PTYHTNYYYMDVWGKGTTVTVSSGGGGSGGGGSGGGGSGGGGSGGGGSGGGGS |
| | GGGGSMAQKRPACTLKPECVQQLLVCSQEAKKSAYCPYSHFPVGAALLTQEGRIF |
| | KGCNIENACYPLGICAERTAIQKAVSEGYKDFRAIAIASDMQDDFISPCGACRQVM |
| | REFGTNWPVYMTKPDGTYIVMTVQELLPSSFGPEDLQKTQ (SEQ ID NO: 237) |
| Ab61_LC_ | DIQMTQSPSSVSASVGDRVTITCRASQGISSWLAWYQQKPGKAPKLLIYAASSLQQ |
| (G4S)3_HC_ | SGVPSRFSGSGSGTDFTLTISSLQPEDFATYYCQQTNSEPYTFGGGTKVEIKGGGGS |
| (G4S)8 linker_ | GGGGGGGGSEVQLLESGGGLVQPGGSLRLSCAASGETESSYVMIWVRQAPGKGL |
| CDA | EWVSSISGDSVTTYYADSVKGRFTISRDNSKNTLYLQMNSLRAEDTAVYYCAKGP |
| | PTYHTNYYYMDVWGKGTTVTVSSGGGGSGGGGSGGGGSGGGGSGGGGSGGGGS |
| | GGGGSGGGGSMAQKRPACTLKPECVQQLLVCSQEAKKSAYCPYSHFPVGAALLT |
| | QEGRIFKGCNIENACYPLGICAERTAIQKAVSEGYKDFRAIAIASDMQDDFISPCGA |
| | CRQVMREFGTNWPVYMTKPDGTYIVMTVQELLPSSFGPEDLQKTQ (SEQ ID NO: |
| | 238) |
| Ab61_LC_ | DIQMTQSPSSVSASVGDRVTITCRASQGISSWLAWYQQKPGKAPKLLIYAASSLQQ |
| (G4S)3_HC_ | SGVPSRFSGSGSGTDFTLTISSLQPEDFATYYCQQTNSEPYTFGGGTKVEIKGGGGS |
| (G4S)9 linker_ | GGGGSGGGGSEVQLLESGGGLVQPGGSLRLSCAASGETESSYVMIWVRQAPGKGL |
| CDA | EWVSSISGDSVTTYYADSVKGRFTISRDNSKNTLYLQMNSLRAEDTAVYYCAKGP |
| | PTYHTNYYYMDVWGKGTTVTVSSGGGGSGGGGSGGGGSGGGGSGGGGSGGGGS |
| | GGGGSGGGGSGGGGSMAQKRPACTLKPECVQQLLVCSQEAKKSAYCPYSHFPVG |
| | AALLTQEGRIFKGCNIENACYPLGICAERTAIQKAVSEGYKDFRAIAIASDMQDDFI |
| | SPCGACRQVMREFGTNWPVYMTKPDGTYIVMTVQELLPSSFGPEDLQKTQ (SEQ |
| | ID NO: 239) |
| Ab61_LC_ | DIQMTQSPSSVSASVGDRVTITCRASQGISSWLAWYQQKPGKAPKLLIYAASSLQQ |
| (G4S)3_HC_ | SGVPSRFSGSGSGTDFTLTISSLQPEDFATYYCQQTNSEPYTFGGGTKVEIKGGGGS |
| (G4S)10 | GGGGSGGGGSEVQLLESGGGLVQPGGSLRLSCAASGETESSYVMIWVRQAPGKGL |
| linker_CDA | EWVSSISGDSVTTYYADSVKGRFTISRDNSKNTLYLQMNSLRAEDTAVYYCAKGP |
| | PTYHTNYYYMDVWGKGTTVTVSSGGGGSGGGGSGGGGSGGGGSGGGGSGGGGS |
| | GGGGSGGGGSGGGGSGGGGSMAQKRPACTLKPECVQQLLVCSQEAKKSAYCPYS |
| | HFPVGAALLTQEGRIFKGCNIENACYPLGICAERTAIQKAVSEGYKDFRAIAIASDM |
| | QDDFISPCGACRQVMREFGTNWPVYMTKPDGTYIVMTVQELLPSSFGPEDLQKTQ |
| | (SEQ ID NO: 240) |
| Ab61_LC_ | DIQMTQSPSSVSASVGDRVTITCRASQGISSWLAWYQQKPGKAPKLLIYAASSLQQ |
| (G4S)3_HC_ | SGVPSRFSGSGSGTDFTLTISSLQPEDFATYYCQQTNSEPYTFGGGTKVEIKGGGGS |
| (G4S)11 | GGGGSGGGGSEVQLLESGGGLVQPGGSLRLSCAASGETESSYVMIWVRQAPGKGL |
| linker_CDA | EWVSSISGDSVTTYYADSVKGRFTISRDNSKNTLYLQMNSLRAEDTAVYYCAKGP |
| | PTYHTNYYYMDVWGKGTTVTVSSGGGGSGGGGSGGGGSGGGGSGGGGSGGGGS |
| | GGGGSGGGGSGGGGSGGGGSGGGGSMAQKRPACTLKPECVQQLLVCSQEAKKSA |
| | YCPYSHFPVGAALLTQEGRIFKGCNIENACYPLGICAERTAIQKAVSEGYKDFRAIA |
| | IASDMQDDFISPCGACRQVMREFGTNWPVYMTKPDGTYIVMTVQELLPSSFGPED |
| | LQKTQ (SEQ ID NO: 241) |
| Ab61_LC_ | DIQMTQSPSSVSASVGDRVTITCRASQGISSWLAWYQQKPGKAPKLLIYAASSLQQ |
| (G4S)3_HC_ | SGVPSRFSGSGSGTDFTLTISSLQPEDFATYYCQQTNSEPYTFGGGTKVEIKGGGGS |
| (G4S)112 | GGGGSGGGGSEVQLLESGGGLVQPGGSLRLSCAASGETESSYVMIWVRQAPGKGL |
| linker_CDA | EWVSSISGDSVTTYYADSVKGRFTISRDNSKNTLYLQMNSLRAEDTAVYYCAKGP |
| | PTYHTNYYYMDVWGKGTTVTVSSGGGGSGGGGSGGGGSGGGGSGGGGSGGGGS |
| | GGGGSGGGGSGGGGSGGGGSGGGGSGGGGSMAQKRPACTLKPECVQQLLVCSQE |
| | AKKSAYCPYSHFPVGAALLTQEGRIFKGCNIENACYPLGICAERTAIQKAVSEGYK |
| | DFRAIAIASDMQDDFISPCGACRQVMREFGTNWPVYMTKPDGTYIVMTVQELLPSS |
| | FGPEDLQKTQ (SEQ ID NO: 242) |
| Ab66_LC_ | DIQMTQSPSSLSASVGDRVTITCRASQSISSYLNWYQQKPGKAPKLLIYAASSLQSG |
| (G4S)3_HC_G4S | VPSRFSGSGSGTDFTLTISSLQPEDFATYYCQQSYIAPYTFGGGTKVEIKGGGGSGG |
| linker_CDA | GGSGGGGSEVQLVESGGGLVQPGGSLRLSCAASGETFSDHYMDWVRQAPGKGLA |
| | SGETFSDHYMDWVRQAPGKGLEWVGRIRNKASSYTTEYAASVKGRFTISRDDSKN |
| | SLYLQMNSLKTEDTAVYYCAREPKYWIDFDLWGRGTLVTVSSGGGGSMAQKRPA |
| | CTLKPECVQQLLVCSQEAKKSAYCPYSHFPVGAALLTQEGRIFKGCNIENACYPLGI |
| | CAERTAIQKAVSEGYKDFRAIAIASDMQDDFISPCGACRQVMREFGTNWPVYMTK |
| | PDGTYIVMTVQELLPSSFGPEDLQKTQ (SEQ ID NO: 243) |
| Ab66_LC_ | DIQMTQSPSSLSASVGDRVTITCRASQSISSYLNWYQQKPGKAPKLLIYAASSLQSG |
| (G4S)3_HC_ | VPSRFSGSGSGTDFTLTISSLQPEDFATYYCQQSYIAPYTFGGGTKVEIKGGGGSGG |
| (G4S)3 linker_ | GGSGGGGSEVQLVESGGGLVQPGGSLRLSCAASGETFSDHYMDWVRQAPGKGLA |
| CDA | SGETFSDHYMDWVRQAPGKGLEWVGRIRNKASSYTTEYAASVKGRFTISRDDSKN |
| | SLYLQMNSLKTEDTAVYYCAREPKYWIDFDLWGRGTLVTVSSGGGGSGGGGSGG |
| | GGSMAQKRPACTLKPECVQQLLVCSQEAKKSAYCPYSHFPVGAALLTQEGRIFKG |
| | CNIENACYPLGICAERTAIQKAVSEGYKDFRAIAIASDMQDDFISPCGACRQVMREF |
| | GTNWPVYMTKPDGTYIVMTVQELLPSSFGPEDLQKTQ (SEQ ID NO: 244) |
| Ab66_LC_ | DIQMTQSPSSLSASVGDRVTITCRASQSISSYLNWYQQKPGKAPKLLIYAASSLQSG |
| (G4S)3_HC_ | VPSRFSGSGSGTDFTLTISSLQPEDFATYYCQQSYIAPYTFGGGTKVEIKGGGGSGG |
| (G4S)4 linker_ | GGSGGGGSEVQLVESGGGLVQPGGSLRLSCAASGETFSDHYMDWVRQAPGKGLA |
| CDA | SGETFSDHYMDWVRQAPGKGLEWVGRIRNKASSYTTEYAASVKGRFTISRDDSKN |
| | SLYLQMNSLKTEDTAVYYCAREPKYWIDFDLWGRGTLVTVSSGGGGSGGGGSGG |
| | GGSGGGGSMAQKRPACTLKPECVQQLLVCSQEAKKSAYCPYSHFPVGAALLTQE |
| | GRIFKGCNIENACYPLGICAERTAIQKAVSEGYKDFRAIAIASDMQDDFISPCGACR |
| | QVMREFGTNWPVYMTKPDGTYIVMTVQELLPSSFGPEDLQKTQ (SEQ ID NO: 245) |
| Ab66_LC_ | DIQMTQSPSSLSASVGDRVTITCRASQSISSYLNWYQQKPGKAPKLLIYAASSLQSG |
| (G4S)3_HC_ | VPSRFSGSGSGTDFTLTISSLQPEDFATYYCQQSYIAPYTFGGGTKVEIKGGGGSGG |
| (G4S)5 linker_ | GGSGGGGSEVQLVESGGGLVQPGGSLRLSCAASGETFSDHYMDWVRQAPGKGLA |
| CDA | SGETFSDHYMDWVRQAPGKGLEWVGRIRNKASSYTTEYAASVKGRFTISRDDSKN |
| | SLYLQMNSLKTEDTAVYYCAREPKYWIDFDLWGRGTLVTVSSGGGGSGGGGSGG |
| | GGSGGGGSGGGGSMAQKRPACTLKPECVQQLLVCSQEAKKSAYCPYSHFPVGAA |
| | LLTQEGRIFKGCNIENACYPLGICAERTAIQKAVSEGYKDFRAIAIASDMQDDFISPC |
| | GACRQVMREFGTNWPVYMTKPDGTYIVMTVQELLPSSFGPEDLQKTQ (SEQ ID |
| | NO: 246) |
| Ab66_LC_ | DIQMTQSPSSLSASVGDRVTITCRASQSISSYLNWYQQKPGKAPKLLIYAASSLQSG |
| (G4S)3_HC_ | VPSRFSGSGSGTDFTLTISSLQPEDFATYYCQQSYIAPYTFGGGTKVEIKGGGGSGG |
| (G4S)6 linker_ | GGSGGGGSEVQLVESGGGLVQPGGSLRLSCAASGETFSDHYMDWVRQAPGKGLA |
| CDA | SGETFSDHYMDWVRQAPGKGLEWVGRIRNKASSYTTEYAASVKGRFTISRDDSKN |
| | SLYLQMNSLKTEDTAVYYCAREPKYWIDFDLWGRGTLVTVSSGGGGSGGGGSGG |
| | GGSGGGGSGGGGSGGGGSMAQKRPACTLKPECVQQLLVCSQEAKKSAYCPYSHF |
| | PVGAALLTQEGRIFKGCNIENACYPLGICAERTAIQKAVSEGYKDFRAIAIASDMQD |
| | DFISPCGACRQVMREFGTNWPVYMTKPDGTYIVMTVQELLPSSFGPEDLQKTQ |
| | (SEQ ID NO: 247) |
| Ab66_LC_ | DIQMTQSPSSLSASVGDRVTITCRASQSISSYLNWYQQKPGKAPKLLIYAASSLQSG |
| (G4S)3_HC_ | VPSRFSGSGSGTDFTLTISSLQPEDFATYYCQQSYIAPYTFGGGTKVEIKGGGGSGG |
| (G4S)7 linker_ | GGSGGGGSEVQLVESGGGLVQPGGSLRLSCAASGETFSDHYMDWVRQAPGKGLA |
| CDA | SGETFSDHYMDWVRQAPGKGLEWVGRIRNKASSYTTEYAASVKGRFTISRDDSKN |
| | SLYLQMNSLKTEDTAVYYCAREPKYWIDFDLWGRGTLVTVSSGGGGSGGGGSGG |
| | GGSGGGGSGGGGSGGGGSGGGGSMAQKRPACTLKPECVQQLLVCSQEAKKSAYC |
| | PYSHFPVGAALLTQEGRIFKGCNIENACYPLGICAERTAIQKAVSEGYKDFRAIAIAS |
| | DMQDDFISPCGACRQVMREFGTNWPVYMTKPDGTYIVMTVQELLPSSFGPEDLQK |
| | TQ (SEQ ID NO: 248) |
| Ab66_LC_ | DIQMTQSPSSLSASVGDRVTITCRASQSISSYLNWYQQKPGKAPKLLIYAASSLQSG |
| (G4S)3_HC_ | VPSRFSGSGSGTDFTLTISSLQPEDFATYYCQQSYIAPYTFGGGTKVEIKGGGGSGG |
| (G4S)8 linker_ | GGSGGGGSEVQLVESGGGLVQPGGSLRLSCAASGETFSDHYMDWVRQAPGKGLA |
| CDA | SGETFSDHYMDWVRQAPGKGLEWVGRIRNKASSYTTEYAASVKGRFTISRDDSKN |
| | SLYLQMNSLKTEDTAVYYCAREPKYWIDFDLWGRGTLVTVSSGGGGSGGGGSGG |
| | GGSGGGGGGGGSGGGGSGGGGSGGGGSMAQKRPACTLKPECVQQLLVCSQEAK |
| | KSAYCPYSHFPVGAALLTQEGRIFKGCNIENACYPLGICAERTAIQKAVSEGYKDFR |
| | AIAIASDMQDDFISPCGACRQVMREFGTNWPVYMTKPDGTYIVMTVQELLPSSFGP |
| | EDLQKTQ (SEQ ID NO: 249) |
| Ab66_LC_ | DIQMTQSPSSLSASVGDRVTITCRASQSISSYLNWYQQKPGKAPKLLIYAASSLQSG |
| (G4S)3_HC_ | VPSRFSGSGSGTDFTLTISSLQPEDFATYYCQQSYIAPYTFGGGTKVEIKGGGGSGG |
| (G4S)9 linker_ | GGSGGGGSEVQLVESGGGLVQPGGSLRLSCAASGETFSDHYMDWVRQAPGKGLA |
| CDA | SGETFSDHYMDWVRQAPGKGLEWVGRIRNKASSYTTEYAASVKGRFTISRDDSKN |
| | SLYLQMNSLKTEDTAVYYCAREPKYWIDFDLWGRGTLVTVSSGGGGSGGGGSGG |
| | GGSGGGGSGGGGSGGGGSGGGGSGGGGSGGGGSMAQKRPACTLKPECVQQLLV |
| | CSQEAKKSAYCPYSHFPVGAALLTQEGRIFKGCNIENACYPLGICAERTAIQKAVSE |
| | GYKDFRAIAIASDMQDDFISPCGACRQVMREFGTNWPVYMTKPDGTYIVMTVQEL |
| | LPSSFGPEDLQKTQ (SEQ ID NO: 250) |
| Ab66_LC_ | DIQMTQSPSSLSASVGDRVTITCRASQSISSYLNWYQQKPGKAPKLLIYAASSLQSG |
| (G4S)3_HC_ | VPSRFSGSGSGTDFTLTISSLQPEDFATYYCQQSYIAPYTFGGGTKVEIKGGGGSGG |
| (G4S)10 | GGSGGGGSEVQLVESGGGLVQPGGSLRLSCAASGETFSDHYMDWVRQAPGKGLA |
| linker_CDA | SGETFSDHYMDWVRQAPGKGLEWVGRIRNKASSYTTEYAASVKGRFTISRDDSKN |
| | SLYLQMNSLKTEDTAVYYCAREPKYWIDFDLWGRGTLVTVSSGGGGSGGGGSGG |
| | GGSGGGGSGGGGSGGGGSGGGGSGGGGSGGGGSGGGGSMAQKRPACTLKPECV |
| | QQLLVCSQEAKKSAYCPYSHFPVGAALLTQEGRIFKGCNIENACYPLGICAERTAIQ |
| | KAVSEGYKDFRAIAIASDMQDDFISPCGACRQVMREFGTNWPVYMTKPDGTYIVM |
| | TVQELLPSSFGPEDLQKTQ (SEQ ID NO: 251) |
| Ab66_LC_ | DIQMTQSPSSLSASVGDRVTITCRASQSISSYLNWYQQKPGKAPKLLIYAASSLQSG |
| (G4S)3_HC_ | VPSRFSGSGSGTDFTLTISSLQPEDFATYYCQQSYIAPYTFGGGTKVEIKGGGGSGG |
| (G4S)11 | GGSGGGGSEVQLVESGGGLVQPGGSLRLSCAASGETFSDHYMDWVRQAPGKGLA |
| linker_CDA | SGETFSDHYMDWVRQAPGKGLEWVGRIRNKASSYTTEYAASVKGRFTISRDDSKN |
| | SLYLQMNSLKTEDTAVYYCAREPKYWIDFDLWGRGTLVTVSSGGGGSGGGGSGG |
| | GGSGGGGSGGGGSGGGGSGGGGSGGGGSGGGGSGGGGSGGGGSMAQKRPACTL |
| | KPECVQQLLVCSQEAKKSAYCPYSHFPVGAALLTQEGRIFKGCNIENACYPLGICA |
| | ERTAIQKAVSEGYKDFRAIAIASDMQDDFISPCGACRQVMREFGTNWPVYMTKPD |
| | GTYIVMTVQELLPSSFGPEDLQKTQ (SEQ ID NO: 252) |
| Ab66_LC_ | DIQMTQSPSSLSASVGDRVTITCRASQSISSYLNWYQQKPGKAPKLLIYAASSLQSG |
| (G4S)3_HC_ | VPSRFSGSGSGTDFTLTISSLQPEDFATYYCQQSYIAPYTFGGGTKVEIKGGGGSGG |
| (G4S)112 | GGSGGGGSEVQLVESGGGLVQPGGSLRLSCAASGETFSDHYMDWVRQAPGKGLA |
| linker_CDA | SGETFSDHYMDWVRQAPGKGLEWVGRIRNKASSYTTEYAASVKGRFTISRDDSKN |
| | SLYLQMNSLKTEDTAVYYCAREPKYWIDFDLWGRGTLVTVSSGGGGSGGGGSGG |
| | GGSGGGGSGGGGSGGGGSGGGGSGGGGSGGGGSGGGGSGGGGSGGGGSMAQKR |
| | PACTLKPECVQQLLVCSQEAKKSAYCPYSHFPVGAALLTQEGRIFKGCNIENACYP |
| | LGICAERTAIQKAVSEGYKDFRAIAIASDMQDDFISPCGACRQVMREFGTNWPVY |
| | MTKPDGTYIVMTVQELLPSSFGPEDLQKTQ (SEQ ID NO: 253) |
| Ab68_LC_ | DIQMTQSPSSLSASVGDRVTITCRASQSISSYLNWYQQKPGKAPKLLIYAASSLQSG |
| (G4S)3_HC_G4S | VPSRFSGSGSGTDFTLTISSLQPEDFATYYCQQSYIAPYTFGGGTKVEIKGGGGSGG |
| linker_CDA | GGSGGGGSEVQLVESGGGLVQPGRSLRLSCTASGFTFSDHDMNWVRQAPGKGLE |
| | WVGRTRNAAGSYTTEYAASVKGRFTISRDDSKNSLYLQMNSLKTEDTAVYYCAR |
| | EPKYWIDFDLWGRGTLVTSSGGGGSMAQKRPACTLKPECVQQLLVCSQEAKKSA |
| | YCPYSHFPVGAALLTQEGRIFKGCNIENACYPLGICAERTAIQKAVSEGYKDFRAIA |
| | IASDMQDDFISPCGACRQVMREFGTNWPVYMTKPDGTYIVMTVQELLPSSFGPED |
| | LQKTQ (SEQ ID NO: 254) |
| Ab68_LC_ | DIQMTQSPSSLSASVGDRVTITCRASQSISSYLNWYQQKPGKAPKLLIYAASSLQSG |
| (G4S)3_HC_ | VPSRFSGSGSGTDFTLTISSLQPEDFATYYCQQSYIAPYTFGGGTKVEIKGGGGSGG |
| (G4S)3 linker_ | GGSGGGGSEVQLVESGGGLVQPGRSLRLSCTASGFTFSDHDMNWVRQAPGKGLE |
| CDA | WVGRTRNAAGSYTTEYAASVKGRFTISRDDSKNSLYLQMNSLKTEDTAVYYCAR |
| | EPKYWIDFDLWGRGTLVTSSGGGGSGGGGSGGGGSMAQKRPACTLKPECVQQLL |
| | VCSQEAKKSAYCPYSHFPVGAALLTQEGRIFKGCNIENACYPLGICAERTAIQKAVS |
| | EGYKDFRAIAIASDMQDDFISPCGACRQVMREFGTNWPVYMTKPDGTYIVMTVQE |
| | LLPSSFGPEDLQKTQ (SEQ ID NO: 255) |
| Ab68_LC_ | DIQMTQSPSSLSASVGDRVTITCRASQSISSYLNWYQQKPGKAPKLLIYAASSLQSG |
| (G4S)3_HC_ | VPSRFSGSGSGTDFTLTISSLQPEDFATYYCQQSYIAPYTFGGGTKVEIKGGGGSGG |
| (G4S)4 linker_ | GGSGGGGSEVQLVESGGGLVQPGRSLRLSCTASGFTFSDHDMNWVRQAPGKGLE |
| CDA | WVGRTRNAAGSYTTEYAASVKGRFTISRDDSKNSLYLQMNSLKTEDTAVYYCAR |
| | EPKYWIDFDLWGRGTLVTSSGGGGSGGGGSGGGGSGGGGSMAQKRPACTLKPEC |
| | VQQLLVCSQEAKKSAYCPYSHFPVGAALLTQEGRIFKGCNIENACYPLGICAERTAI |
| | QKAVSEGYKDFRAIAIASDMQDDFISPCGACRQVMREFGTNWPVYMTKPDGTYIV |
| | MTVQELLPSSFGPEDLQKTQ (SEQ ID NO: 256) |
| Ab68_LC_ | DIQMTQSPSSLSASVGDRVTITCRASQSISSYLNWYQQKPGKAPKLLIYAASSLQSG |
| (G4S)3_HC_ | VPSRFSGSGSGTDFTLTISSLQPEDFATYYCQQSYIAPYTFGGGTKVEIKGGGGSGG |
| (G4S)5 linker_ | GGSGGGGSEVQLVESGGGLVQPGRSLRLSCTASGFTFSDHDMNWVRQAPGKGLE |
| CDA | WVGRTRNAAGSYTTEYAASVKGRFTISRDDSKNSLYLQMNSLKTEDTAVYYCAR |
| | EPKYWIDFDLWGRGTLVTSSGGGGSGGGGSGGGGSGGGGSGGGGSMAQKRPACT |
| | LKPECVQQLLVCSQEAKKSAYCPYSHFPVGAALLTQEGRIFKGCNIENACYPLGIC |
| | AERTAIQKAVSEGYKDFRAIAIASDMQDDFISPCGACRQVMREFGTNWPVYMTKP |
| | DGTYIVMTVQELLPSSFGPEDLQKTQ (SEQ ID NO: 257) |
| Ab68_LC_ | DIQMTQSPSSLSASVGDRVTITCRASQSISSYLNWYQQKPGKAPKLLIYAASSLQSG |
| (G4S)3_HC_ | VPSRFSGSGSGTDFTLTISSLQPEDFATYYCQQSYIAPYTFGGGTKVEIKGGGGSGG |
| (G4S)6 linker_ | GGSGGGGSEVQLVESGGGLVQPGRSLRLSCTASGFTFSDHDMNWVRQAPGKGLE |
| CDA | WVGRTRNAAGSYTTEYAASVKGRFTISRDDSKNSLYLQMNSLKTEDTAVYYCAR |
| | EPKYWIDFDLWGRGTLVTSSGGGGSGGGGSGGGGSGGGGSGGGGSGGGGSMAQ |
| | KRPACTLKPECVQQLLVCSQEAKKSAYCPYSHFPVGAALLTQEGRIFKGCNIENAC |
| | YPLGICAERTAIQKAVSEGYKDFRAIAIASDMQDDFISPCGACRQVMREFGTNWPV |
| | YMTKPDGTYIVMTVQELLPSSFGPEDLQKTQ (SEQ ID NO: 258) |
| Ab68_LC_ | DIQMTQSPSSLSASVGDRVTITCRASQSISSYLNWYQQKPGKAPKLLIYAASSLQSG |
| (G4S)3_HC_ | VPSRFSGSGSGTDFTLTISSLQPEDFATYYCQQSYIAPYTFGGGTKVEIKGGGGSGG |
| (G4S)7 linker_ | GGSGGGGSEVQLVESGGGLVQPGRSLRLSCTASGFTFSDHDMNWVRQAPGKGLE |
| CDA | WVGRTRNAAGSYTTEYAASVKGRFTISRDDSKNSLYLQMNSLKTEDTAVYYCAR |
| | EPKYWIDFDLWGRGTLVTSSGGGGSGGGGSGGGGSGGGGSGGGGSGGGGSGGGG |
| | SMAQKRPACTLKPECVQQLLVCSQEAKKSAYCPYSHFPVGAALLTQEGRIFKGCNI |
| | ENACYPLGICAERTAIQKAVSEGYKDFRAIAIASDMQDDFISPCGACRQVMREFGT |
| | NWPVYMTKPDGTYIVMTVQELLPSSFGPEDLQKTQ (SEQ ID NO: 259) |
| Ab68_LC_ | DIQMTQSPSSLSASVGDRVTITCRASQSISSYLNWYQQKPGKAPKLLIYAASSLQSG |
| (G4S)3_HC_ | VPSRFSGSGSGTDFTLTISSLQPEDFATYYCQQSYIAPYTFGGGTKVEIKGGGGSGG |
| (G4S)8 linker_ | GGSGGGGSEVQLVESGGGLVQPGRSLRLSCTASGFTFSDHDMNWVRQAPGKGLE |
| CDA | WVGRTRNAAGSYTTEYAASVKGRFTISRDDSKNSLYLQMNSLKTEDTAVYYCAR |
| | EPKYWIDFDLWGRGTLVTSSGGGGSGGGGSGGGGSGGGGSGGGGSGGGGSGGGG |
| | SGGGGSMAQKRPACTLKPECVQQLLVCSQEAKKSAYCPYSHFPVGAALLTQEGRI |
| | FKGCNIENACYPLGICAERTAIQKAVSEGYKDFRAIAIASDMQDDFISPCGACRQV |
| | [sequence omitted] (SEQ ID NO: 260) |
| Ab68_LC_ | DIQMTQSPSSLSASVGDRVTITCRASQSISSYLNWYQQKPGKAPKLLIYAASSLQSG |
| (G4S)3_HC_ | VPSRFSGSGSGTDFTLTISSLQPEDFATYYCQQSYIAPYTFGGGTKVEIKGGGGSGG |
| (G4S)9 linker_ | GGSGGGGSEVQLVESGGGLVQPGRSLRLSCTASGFTFSDHDMNWVRQAPGKGLE |
| CDA | WVGRTRNAAGSYTTEYAASVKGRFTISRDDSKNSLYLQMNSLKTEDTAVYYCAR |
| | EPKYWIDFDLWGRGTLVTSSGGGGSGGGGSGGGGSGGGGSGGGGSGGGGSGGGG |
| | SGGGGSGGGGSMAQKRPACTLKPECVQQLLVCSQEAKKSAYCPYSHFPVGAALLT |
| | QEGRIFKGCNIENACYPLGICAERTAIQKAVSEGYKDFRAIAIASDMQDDFISPCGA |
| | CRQVMREFGTNWPVYMTKPDGTYIVMTVQELLPSSFGPEDLQKTQ (SEQ ID NO: |
| | 261) |
| Ab68_LC_ | DIQMTQSPSSLSASVGDRVTITCRASQSISSYLNWYQQKPGKAPKLLIYAASSLQSG |
| (G4S)3_HC_ | VPSRFSGSGSGTDFTLTISSLQPEDFATYYCQQSYIAPYTFGGGTKVEIKGGGGSGG |
| (G4S)10 | GGSGGGGSEVQLVESGGGLVQPGRSLRLSCTASGFTFSDHDMNWVRQAPGKGLE |
| linker_CDA | WVGRTRNAAGSYTTEYAASVKGRFTISRDDSKNSLYLQMNSLKTEDTAVYYCAR |
| | EPKYWIDFDLWGRGTLVTSSGGGGSGGGGSGGGGSGGGGSGGGGSGGGGSGGGG |
| | SGGGGSGGGGSGGGGSMAQKRPACTLKPECVQQLLVCSQEAKKSAYCPYSHFPV |
| | GAALLTQEGRIFKGCNIENACYPLGICAERTAIQKAVSEGYKDFRAIAIASDMQDDF |
| | ISPCGACRQVMREFGTNWPVYMTKPDGTYIVMTVQELLPSSFGPEDLQKTQ (SEQ |
| | ID NO: 262) |
| Ab68_LC_ | DIQMTQSPSSLSASVGDRVTITCRASQSISSYLNWYQQKPGKAPKLLIYAASSLQSG |
| (G4S)3_HC_ | VPSRFSGSGSGTDFTLTISSLQPEDFATYYCQQSYIAPYTFGGGTKVEIKGGGGSGG |
| (G4S)11 | GGSGGGGSEVQLVESGGGLVQPGRSLRLSCTASGFTFSDHDMNWVRQAPGKGLE |
| linker_CDA | WVGRTRNAAGSYTTEYAASVKGRFTISRDDSKNSLYLQMNSLKTEDTAVYYCAR |
| | EPKYWIDFDLWGRGTLVTSSGGGGSGGGGSGGGGSGGGGSGGGGSGGGGSGGGG |
| | SGGGGSGGGGSGGGGSGGGGSMAQKRPACTLKPECVQQLLVCSQEAKKSAYCPY |
| | SHFPVGAALLTQEGRIFKGCNIENACYPLGICAERTAIQKAVSEGYKDFRAIAIASD |
| | MQDDFISPCGACRQVMREFGTNWPVYMTKPDGTYIVMTVQELLPSSFGPEDLQKT |
| | Q (SEQ ID NO: 263) |
| Ab68_LC_ | DIQMTQSPSSLSASVGDRVTITCRASQSISSYLNWYQQKPGKAPKLLIYAASSLQSG |
| (G4S)3_HC_ | VPSRFSGSGSGTDFTLTISSLQPEDFATYYCQQSYIAPYTFGGGTKVEIKGGGGSGG |
| (G4S)112 | GGSGGGGSEVQLVESGGGLVQPGRSLRLSCTASGFTFSDHDMNWVRQAPGKGLE |
| linker_CDA | WVGRTRNAAGSYTTEYAASVKGRFTISRDDSKNSLYLQMNSLKTEDTAVYYCAR |
| | EPKYWIDFDLWGRGTLVTSSGGGGSGGGGSGGGGSGGGGSGGGGSGGGGSGGGG |
| | SGGGGSGGGGSGGGGSGGGGSGGGGSMAQKRPACTLKPECVQQLLVCSQEAKKS |
| | AYCPYSHFPVGAALLTQEGRIFKGCNIENACYPLGICAERTAIQKAVSEGYKDFRAI |
| | AIASDMQDDFISPCGACRQVMREFGTNWPVYMTKPDGTYIVMTVQELLPSSFGPE |
| | DLQKTQ (SEQ ID NO: 264) |
| Ab69_LC_ | EVQLVESGGGLVQPGGSLRLSCAASGETFVDHDMDWVRQAPGKGLEWVGRTRN |
| (G4S)3_HC_G4S | KLGSYTTEYAASVKGRETGRDDSKNSLYLQMNSLKTEDTAVYYCAREPKYWIDF |
| linker_CDA | DLWGRGTLVTVSSGGGGSGGGGSGGGGSDIQMTQSPSSLSASVGDRVTITCRASQS |
| | ISSYLNWYQQKPGKAPKLLIYAASSLQSGVPSRFSGSGSGTDFTLTISSLQPEDFATY |
| | YCQQSYIAPYIFGGGTKVEIKGGGGSMAQKRPACTLKPECVQQLLVCSQEAKKSA |
| | YCPYSHFPVGAALLTQEGRIFKGCNIENACYPLGICAERTAIQKAVSEGYKDFRAIA |
| | IASDMQDDFISPCGACRQVMREFGTNWPVYMTKPDGTYIVMTVQELLPSSFGPED |
| | LQKTQ (SEQ ID NO: 265) |
| Ab69_LC_ | EVQLVESGGGLVQPGGSLRLSCAASGETFVDHDMDWVRQAPGKGLEWVGRTRN |
| (G4S)3_HC_ | KLGSYTTEYAASVKGRETGRDDSKNSLYLQMNSLKTEDTAVYYCAREPKYWIDF |
| (G4S)3 linker_ | DLWGRGTLVTVSSGGGGSGGGGSGGGGSDIQMTQSPSSLSASVGDRVTITCRASQS |
| CDA | ISSYLNWYQQKPGKAPKLLIYAASSLQSGVPSRFSGSGSGTDFTLTISSLQPEDFATY |
| | YCQQSYIAPYIFGGGTKVEIKGGGGGGGGSGGGGSMAQKRPACTLKPECVQQLL |
| | VCSQEAKKSAYCPYSHFPVGAALLTQEGRIFKGCNIENACYPLGICAERTAIQKAVS |
| | EGYKDFRAIAIASDMQDDFISPCGACRQVMREFGTNWPVYMTKPDGTYIVMTVQE |
| | LLPSSFGPEDLQKTQ (SEQ ID NO: 266) |
| Ab69_LC_ | EVQLVESGGGLVQPGGSLRLSCAASGETFVDHDMDWVRQAPGKGLEWVGRTRN |
| (G4S)3_HC_ | KLGSYTTEYAASVKGRETGRDDSKNSLYLQMNSLKTEDTAVYYCAREPKYWIDF |
| (G4S)4 linker_ | DLWGRGTLVTVSSGGGGSGGGGSGGGGSDIQMTQSPSSLSASVGDRVTITCRASQS |
| CDA | ISSYLNWYQQKPGKAPKLLIYAASSLQSGVPSRFSGSGSGTDFTLTISSLQPEDFATY |
| | YCQQSYIAPYIFGGGTKVEIKGGGGSGGGGSGGGGSGGGGSMAQKRPACTLKPEC |
| | VQQLLVCSQEAKKSAYCPYSHFPVGAALLTQEGRIFKGCNIENACYPLGICAERTAI |
| | QKAVSEGYKDFRAIAIASDMQDDFISPCGACRQVMREFGTNWPVYMTKPDGTYIV |
| | MTVQELLPSSFGPEDLQKTQ (SEQ ID NO: 267) |
| Ab69_LC_ | EVQLVESGGGLVQPGGSLRLSCAASGETFVDHDMDWVRQAPGKGLEWVGRTRN |
| (G4S)3_HC_ | KLGSYTTEYAASVKGRETGRDDSKNSLYLQMNSLKTEDTAVYYCAREPKYWIDF |
| (G4S)5 linker_ | DLWGRGTLVTVSSGGGGSGGGGSGGGGSDIQMTQSPSSLSASVGDRVTITCRASQS |
| CDA | ISSYLNWYQQKPGKAPKLLIYAASSLQSGVPSRFSGSGSGTDFTLTISSLQPEDFATY |
| | YCQQSYIAPYIFGGGTKVEIKGGGGSGGGGSGGGGSGGGGSGGGGSMAQKRPACT |
| | LKPECVQQLLVCSQEAKKSAYCPYSHFPVGAALLTQEGRIFKGCNIENACYPLGIC |
| | AERTAIQKAVSEGYKDFRAIAIASDMQDDFISPCGACRQVMREFGTNWPVYMTKP |
| | DGTYIVMTVQELLPSSFGPEDLQKTQ (SEQ ID NO: 268) |
| Ab69_LC_ | EVQLVESGGGLVQPGGSLRLSCAASGETFVDHDMDWVRQAPGKGLEWVGRTRN |
| (G4S)3_HC_ | KLGSYTTEYAASVKGRETGRDDSKNSLYLQMNSLKTEDTAVYYCAREPKYWIDF |
| (G4S)6 linker_ | DLWGRGTLVTVSSGGGGSGGGGSGGGGSDIQMTQSPSSLSASVGDRVTITCRASQS |
| CDA | ISSYLNWYQQKPGKAPKLLIYAASSLQSGVPSRFSGSGSGTDFTLTISSLQPEDFATY |
| | YCQQSYIAPYIFGGGTKVEIKGGGGSGGGGSGGGGSGGGGSGGGGSGGGGSMAQ |
| | KRPACTLKPECVQQLLVCSQEAKKSAYCPYSHFPVGAALLTQEGRIFKGCNIENAC |
| | YPLGICAERTAIQKAVSEGYKDFRAIAIASDMQDDFISPCGACRQVMREFGTNWPV |
| | YMTKPDGTYIVMTVQELLPSSFGPEDLQKTQ (SEQ ID NO: 269) |
| Ab69_LC_ | EVQLVESGGGLVQPGGSLRLSCAASGETFVDHDMDWVRQAPGKGLEWVGRTRN |
| (G4S)3_HC_ | KLGSYTTEYAASVKGRETGRDDSKNSLYLQMNSLKTEDTAVYYCAREPKYWIDF |
| (G4S)7 linker_ | DLWGRGTLVTVSSGGGGSGGGGSGGGGSDIQMTQSPSSLSASVGDRVTITCRASQS |
| CDA | ISSYLNWYQQKPGKAPKLLIYAASSLQSGVPSRFSGSGSGTDFTLTISSLQPEDFATY |
| | YCQQSYIAPYIFGGGTKVEIKGGGGSGGGGSGGGGSGGGGSGGGGSGGGGSGGGG |
| | SMAQKRPACTLKPECVQQLLVCSQEAKKSAYCPYSHFPVGAALLTQEGRIFKGCNI |
| | ENACYPLGICAERTAIQKAVSEGYKDFRAIAIASDMQDDFISPCGACRQVMREFGT |
| | NWPVYMTKPDGTYIVMTVQELLPSSFGPEDLQKTQ (SEQ ID NO: 270) |
| Ab69_LC_ | EVQLVESGGGLVQPGGSLRLSCAASGETFVDHDMDWVRQAPGKGLEWVGRTRN |
| (G4S)3_HC_ | KLGSYTTEYAASVKGRETGRDDSKNSLYLQMNSLKTEDTAVYYCAREPKYWIDF |
| (G4S)8 linker_ | DLWGRGTLVTVSSGGGGSGGGGSGGGGSDIQMTQSPSSLSASVGDRVTITCRASQS |
| CDA | ISSYLNWYQQKPGKAPKLLIYAASSLQSGVPSRFSGSGSGTDFTLTISSLQPEDFATY |
| | YCQQSYIAPYIFGGGTKVEIKGGGGSGGGGSGGGGSGGGGSGGGGSGGGGSGGGG |
| | SGGGGSMAQKRPACTLKPECVQQLLVCSQEAKKSAYCPYSHFPVGAALLTQEGRI |
| | FKGCNIENACYPLGICAERTAIQKAVSEGYKDFRAIAIASDMQDDFISPCGACRQV |
| | [sequence omitted] (SEQ ID NO: 271) |
| Ab69_LC_ | EVQLVESGGGLVQPGGSLRLSCAASGETFVDHDMDWVRQAPGKGLEWVGRTRN |
| (G4S)3_HC_ | KLGSYTTEYAASVKGRETGRDDSKNSLYLQMNSLKTEDTAVYYCAREPKYWIDF |
| (G4S)9 linker_ | DLWGRGTLVTVSSGGGGSGGGGSGGGGSDIQMTQSPSSLSASVGDRVTITCRASQS |
| CDA | ISSYLNWYQQKPGKAPKLLIYAASSLQSGVPSRFSGSGSGTDFTLTISSLQPEDFATY |
| | YCQQSYIAPYIFGGGTKVEIKGGGGGGGGSGGGGSGGGGSGGGGSGGGGSGGGG |
| | SGGGGSGGGGSMAQKRPACTLKPECVQQLLVCSQEAKKSAYCPYSHFPVGAALLT |
| | QEGRIFKGCNIENACYPLGICAERTAIQKAVSEGYKDFRAIAIASDMQDDFISPCGA |
| | CRQVMREFGTNWPVYMTKPDGTYIVMTVQELLPSSFGPEDLQKTQ (SEQ ID NO: |
| | 272) |
| Ab69_LC_ | EVQLVESGGGLVQPGGSLRLSCAASGETFVDHDMDWVRQAPGKGLEWVGRTRN |
| (G4S)3_HC_ | KLGSYTTEYAASVKGRETGRDDSKNSLYLQMNSLKTEDTAVYYCAREPKYWIDF |
| (G4S)10 | DLWGRGTLVTVSSGGGGSGGGGSGGGGSDIQMTQSPSSLSASVGDRVTITCRASQS |
| linker_CDA | ISSYLNWYQQKPGKAPKLLIYAASSLQSGVPSRFSGSGSGTDFTLTISSLQPEDFATY |
| | YCQQSYIAPYIFGGGTKVEIKGGGGSGGGGSGGGGSGGGGSGGGGSGGGGSGGGG |
| | SGGGGSGGGGSGGGGSMAQKRPACTLKPECVQQLLVCSQEAKKSAYCPYSHFPV |
| | GAALLTQEGRIFKGCNIENACYPLGICAERTAIQKAVSEGYKDFRAIAIASDMQDDF |
| | ISPCGACRQVMREFGTNWPVYMTKPDGTYIVMTVQELLPSSFGPEDLQKTQ (SEQ |
| | ID NO: 273 |
| Ab69_LC_ | EVQLVESGGGLVQPGGSLRLSCAASGETFVDHDMDWVRQAPGKGLEWVGRTRN |
| (G4S)3_HC_ | KLGSYTTEYAASVKGRETGRDDSKNSLYLQMNSLKTEDTAVYYCAREPKYWIDF |
| (G4S)11 | DLWGRGTLVTVSSGGGGSGGGGSGGGGSDIQMTQSPSSLSASVGDRVTITCRASQS |
| linker_CDA | ISSYLNWYQQKPGKAPKLLIYAASSLQSGVPSRFSGSGSGTDFTLTISSLQPEDFATY |
| | YCQQSYIAPYIFGGGTKVEIKGGGGSGGGGSGGGGSGGGGSGGGGSGGGGGGGG |
| | SGGGGSGGGGSGGGGSGGGGSMAQKRPACTLKPECVQQLLVCSQEAKKSAYCPY |
| | SHFPVGAALLTQEGRIFKGCNIENACYPLGICAERTAIQKAVSEGYKDFRAIAIASD |
| | MQDDFISPCGACRQVMREFGTNWPVYMTKPDGTYIVMTVQELLPSSFGPEDLQKT |
| | Q (SEQ ID NO: 274) |
| Ab69_LC_ | EVQLVESGGGLVQPGGSLRLSCAASGETFVDHDMDWVRQAPGKGLEWVGRTRN |
| (G4S)3_HC_ | KLGSYTTEYAASVKGRETGRDDSKNSLYLQMNSLKTEDTAVYYCAREPKYWIDF |
| (G4S)112 | DLWGRGTLVTVSSGGGGSGGGGSGGGGSDIQMTQSPSSLSASVGDRVTITCRASQS |
| linker_CDA | ISSYLNWYQQKPGKAPKLLIYAASSLQSGVPSRFSGSGSGTDFTLTISSLQPEDFATY |
| | YCQQSYIAPYIFGGGTKVEIKGGGGSGGGGSGGGGSGGGGSGGGGSGGGGSGGGG |
| | SGGGGSGGGGSGGGGSGGGGSGGGGSMAQKRPACTLKPECVQQLLVCSQEAKKS |
| | AYCPYSHFPVGAALLTQEGRIFKGCNIENACYPLGICAERTAIQKAVSEGYKDFRAI |
| | AIASDMQDDFISPCGACRQVMREFGTNWPVYMTKPDGTYIVMTVQELLPSSFGPE |
| | DLQKTQ (SEQ ID NO: 275) |
| Ab58_HC_ | EVQLLESGGGLVQPGGSLRLSCAASGETFSNYAMSWVRQAPGKGLEWVSAISGSG |
| (G4S)3_LC_G4S | GSTYYADSVKGRFTISRDNSKNTLYLQMNSLRAEDTAVYYCAKGPPTYHTNYYY |
| linker_CDA | MDVWGKGTTVTVSSGGGGSGGGGSGGGGSDIQMTQSPSSVSASVGDRVTITCRAS |
| | QGISSWLAWYQQKPGKAPKLLLIYAASSLQSGVPSRFSGSGSGTDFTLTISSLQPED |
| | FATYYCQQTNSFPYTFGGGTKVEIKGGGGSMAQKRPACTLKPECVQQLLVCSQEA |
| | KKSAYCPYSHFPVGAALLTQEGRIFKGCNIENACYPLGICAERTAIQKAVSEGYKDF |
| | RAIAIASDMQDDFISPCGACRQVMREFGTNWPVYMTKPDGTYIVMTVQELLPSSFG |
| | PEDLQKTQ (SEQ ID NO: 276) |
| Ab58_HC_ | EVQLLESGGGLVQPGGSLRLSCAASGETFSNYAMSWVRQAPGKGLEWVSAISGSG |
| (G4S)3_LC_ | GSTYYADSVKGRFTISRDNSKNTLYLQMNSLRAEDTAVYYCAKGPPTYHTNYYY |
| (G4S)3 | MDVWGKGTTVTVSSGGGGSGGGGSGGGGSDIQMTQSPSSVSASVGDRVTITCRAS |
| linker_CDA | QGISSWLAWYQQKPGKAPKLLLIYAASSLQSGVPSRFSGSGSGTDFTLTISSLQPED |
| | FATYYCQQTNSFPYTFGGGTKVEIKGGGGSGGGGSGGGGSMAQKRPACTLKPECV |
| | QQLLVCSQEAKKSAYCPYSHFPVGAALLTQEGRIFKGCNIENACYPLGICAERTAIQ |
| | KAVSEGYKDFRAIAIASDMQDDFISPCGACRQVMREFGTNWPVYMTKPDGTYIVM |
| | TVQELLPSSFGPEDLQKTQ (SEQ ID NO: 277) |
| Ab58_HC_ | EVQLLESGGGLVQPGGSLRLSCAASGETFSNYAMSWVRQAPGKGLEWVSAISGSG |
| (G4S)3_LC_ | GSTYYADSVKGRFTISRDNSKNTLYLQMNSLRAEDTAVYYCAKGPPTYHTNYYY |
| (G4S)4 | MDVWGKGTTVTVSSGGGGSGGGGSGGGGSDIQMTQSPSSVSASVGDRVTITCRAS |
| linker_CDA | QGISSWLAWYQQKPGKAPKLLLIYAASSLQSGVPSRFSGSGSGTDFTLTISSLQPED |
| | FATYYCQQTNSFPYTFGGGTKVEIKGGGGSGGGGSGGGGSGGGGSMAQKRPACT |
| | LKPECVQQLLVCSQEAKKSAYCPYSHFPVGAALLTQEGRIFKGCNIENACYPLGIC |
| | AERTAIQKAVSEGYKDFRAIAIASDMQDDFISPCGACRQVMREFGTNWPVYMTKP |
| | DGTYIVMTVQELLPSSFGPEDLQKTQ (SEQ ID NO: 278) |
| Ab58_HC_ | EVQLLESGGGLVQPGGSLRLSCAASGETFSNYAMSWVRQAPGKGLEWVSAISGSG |
| (G4S)3_LC_ | GSTYYADSVKGRFTISRDNSKNTLYLQMNSLRAEDTAVYYCAKGPPTYHTNYYY |
| (G4S)5 | MDVWGKGTTVTVSSGGGGSGGGGSGGGGSDIQMTQSPSSVSASVGDRVTITCRAS |
| linker_CDA | QGISSWLAWYQQKPGKAPKLLLIYAASSLQSGVPSRFSGSGSGTDFTLTISSLQPED |
| | FATYYCQQTNSFPYTFGGGTKVEIKGGGGSGGGGSGGGGSGGGGSGGGGSMAQK |
| | RPACTLKPECVQQLLVCSQEAKKSAYCPYSHFPVGAALLTQEGRIFKGCNIENACY |
| | PLGICAERTAIQKAVSEGYKDFRAIAIASDMQDDFISPCGACRQVMREFGTNWPVY |
| | MTKPDGTYIVMTVQELLPSSFGPEDLQKTQ (SEQ ID NO: 279) |
| Ab58_HC_ | EVQLLESGGGLVQPGGSLRLSCAASGETFSNYAMSWVRQAPGKGLEWVSAISGSG |
| (G4S)3_LC_ | GSTYYADSVKGRFTISRDNSKNTLYLQMNSLRAEDTAVYYCAKGPPTYHTNYYY |
| (G4S)6 | MDVWGKGTTVTVSSGGGGSGGGGSGGGGSDIQMTQSPSSVSASVGDRVTITCRAS |
| linker_CDA | QGISSWLAWYQQKPGKAPKLLLIYAASSLQSGVPSRFSGSGSGTDFTLTISSLQPED |
| | FATYYCQQTNSFPYTFGGGTKVEIKGGGGSGGGGSGGGGSGGGGSGGGGSGGGG |
| | SMAQKRPACTLKPECVQQLLVCSQEAKKSAYCPYSHFPVGAALLTQEGRIFKGCNI |
| | ENACYPLGICAERTAIQKAVSEGYKDFRAIAIASDMQDDFISPCGACRQVMREFGT |
| | NWPVYMTKPDGTYIVMTVQELLPSSFGPEDLQKTQ (SEQ ID NO: 280) |
| Ab58_HC_ | EVQLLESGGGLVQPGGSLRLSCAASGETFSNYAMSWVRQAPGKGLEWVSAISGSG |
| (G4S)3_LC_ | GSTYYADSVKGRFTISRDNSKNTLYLQMNSLRAEDTAVYYCAKGPPTYHTNYYY |
| (G4S)7 | MDVWGKGTTVTVSSGGGGSGGGGSGGGGSDIQMTQSPSSVSASVGDRVTITCRAS |
| linker_CDA | QGISSWLAWYQQKPGKAPKLLLIYAASSLQSGVPSRFSGSGSGTDFTLTISSLQPED |
| | FATYYCQQTNSFPYTFGGGTKVEIKGGGGSGGGGSGGGGSGGGGSGGGGSGGGG |
| | SGGGGSMAQKRPACTLKPECVQQLLVCSQEAKKSAYCPYSHFPVGAALLTQEGRI |
| | FKGCNIENACYPLGICAERTAIQKAVSEGYKDFRAIAIASDMQDDFISPCGACRQV |
| | [sequence omitted] (SEQ ID NO: 281) |
| Ab58_HC_ | EVQLLESGGGLVQPGGSLRLSCAASGETFSNYAMSWVRQAPGKGLEWVSAISGSG |
| (G4S)3_LC_ | GSTYYADSVKGRFTISRDNSKNTLYLQMNSLRAEDTAVYYCAKGPPTYHTNYYY |
| (G4S)8 | MDVWGKGTTVTVSSGGGGSGGGGSGGGGSDIQMTQSPSSVSASVGDRVTITCRAS |
| linker_CDA | QGISSWLAWYQQKPGKAPKLLLIYAASSLQSGVPSRFSGSGSGTDFTLTISSLQPED |
| | FATYYCQQTNSFPYTFGGGTKVEIKGGGGSGGGGSGGGGSGGGGSGGGGSGGGG |
| | SGGGGSGGGGSMAQKRPACTLKPECVQQLLVCSQEAKKSAYCPYSHFPVGAALLT |
| | QEGRIFKGCNIENACYPLGICAERTAIQKAVSEGYKDFRAIAIASDMQDDFISPCGA |
| | CRQVMREFGTNWPVYMTKPDGTYIVMTVQELLPSSFGPEDLQKTQ (SEQ ID NO: |
| | 282) |
| Ab58_HC_ | EVQLLESGGGLVQPGGSLRLSCAASGETFSNYAMSWVRQAPGKGLEWVSAISGSG |
| (G4S)3_LC_ | GSTYYADSVKGRFTISRDNSKNTLYLQMNSLRAEDTAVYYCAKGPPTYHTNYYY |
| (G4S)9 | MDVWGKGTTVTVSSGGGGSGGGGSGGGGSDIQMTQSPSSVSASVGDRVTITCRAS |
| linker_CDA | QGISSWLAWYQQKPGKAPKLLLIYAASSLQSGVPSRFSGSGSGTDFTLTISSLQPED |
| | FATYYCQQTNSFPYTFGGGTKVEIKGGGGSGGGGSGGGGSGGGGSGGGGSGGGG |
| | SGGGGSGGGGSGGGGSMAQKRPACTLKPECVQQLLVCSQEAKKSAYCPYSHFPV |
| | GAALLTQEGRIFKGCNIENACYPLGICAERTAIQKAVSEGYKDFRAIAIASDMQDDF |
| | ISPCGACRQVMREFGTNWPVYMTKPDGTYIVMTVQELLPSSFGPEDLQKTQ (SEQ |
| | ID NO: 283) |
| Ab58_HC_ | EVQLLESGGGLVQPGGSLRLSCAASGETFSNYAMSWVRQAPGKGLEWVSAISGSG |
| (G4S)3_LC_ | GSTYYADSVKGRFTISRDNSKNTLYLQMNSLRAEDTAVYYCAKGPPTYHTNYYY |
| (G4S)10 | MDVWGKGTTVTVSSGGGGSGGGGSGGGGSDIQMTQSPSSVSASVGDRVTITCRAS |
| linker_CDA | QGISSWLAWYQQKPGKAPKLLLIYAASSLQSGVPSRFSGSGSGTDFTLTISSLQPED |
| | FATYYCQQTNSFPYTFGGGTKVEIKGGGGSGGGGSGGGGSGGGGSGGGGSGGGG |
| | SGGGGSGGGGSGGGGSGGGGSMAQKRPACTLKPECVQQLLVCSQEAKKSAYCPY |
| | SHFPVGAALLTQEGRIFKGCNIENACYPLGICAERTAIQKAVSEGYKDFRAIAIASD |
| | MQDDFISPCGACRQVMREFGTNWPVYMTKPDGTYIVMTVQELLPSSFGPEDLQKT |
| | Q (SEQ ID NO: 284) |
| Ab58_HC_ | EVQLLESGGGLVQPGGSLRLSCAASGETFSNYAMSWVRQAPGKGLEWVSAISGSG |
| (G4S)3_LC_ | GSTYYADSVKGRFTISRDNSKNTLYLQMNSLRAEDTAVYYCAKGPPTYHTNYYY |
| (G4S)11 | MDVWGKGTTVTVSSGGGGSGGGGSGGGGSDIQMTQSPSSVSASVGDRVTITCRAS |
| linker_CDA | QGISSWLAWYQQKPGKAPKLLLIYAASSLQSGVPSRFSGSGSGTDFTLTISSLQPED |
| | FATYYCQQTNSFPYTFGGGTKVEIKGGGGSGGGGSGGGGSGGGGSGGGGSGGGG |
| | SGGGGSGGGGSGGGGSGGGGSGGGGSMAQKRPACTLKPECVQQLLVCSQEAKKS |
| | AYCPYSHFPVGAALLTQEGRIFKGCNIENACYPLGICAERTAIQKAVSEGYKDFRAI |
| | AIASDMQDDFISPCGACRQVMREFGTNWPVYMTKPDGTYIVMTVQELLPSSFGPE |
| | DLQKTQ (SEQ ID NO: 285) |
| Ab58_HC_ | EVQLLESGGGLVQPGGSLRLSCAASGETFSNYAMSWVRQAPGKGLEWVSAISGSG |
| (G4S)3_LC_ | GSTYYADSVKGRFTISRDNSKNTLYLQMNSLRAEDTAVYYCAKGPPTYHTNYYY |
| (G4S)112 | MDVWGKGTTVTVSSGGGGSGGGGSGGGGSDIQMTQSPSSVSASVGDRVTITCRAS |
| linker_CDA | QGISSWLAWYQQKPGKAPKLLLIYAASSLQSGVPSRFSGSGSGTDFTLTISSLQPED |
| | FATYYCQQTNSFPYTFGGGTKVEIKGGGGSGGGGSGGGGSGGGGSGGGGSGGGG |
| | SGGGGSGGGGSGGGGSGGGGSGGGGSGGGGSMAQKRPACTLKPECVQQLLVCSQ |
| | EAKKSAYCPYSHFPVGAALLTQEGRIFKGCNIENACYPLGICAERTAIQKAVSEGY |
| | KDFRAIAIASDMQDDFISPCGACRQVMREFGTNWPVYMTKPDGTYIVMTVQELLP |
| | SSFGPEDLQKTQ (SEQ ID NO: 286) |
| Ab61_HC_ | EVQLLESGGGLVQPGGSLRLSCAASGETESSYVMIWVRQAPGKGLEWVSSISGDSV |
| (G4S)3_LC_G4S | TTYYADSVKGRFTISRDNSKNTLYLQMNSLRAEDTAVYYCAKGPPTYHTNYYYM |
| linker_CDA | DVWGKGTTVTVSSGGGGSGGGGSGGGGSDIQMTQSPSSVSASVGDRVTITCRASQ |
| | GISSWLAWYQQKPGKAPKLLIYAASSLQQSGVPSRFSGSGSGTDFTLTISSLQPEDF |
| | ATYYCQQTNSEPYTFGGGTKVEIKGGGGSMAQKRPACTLKPECVQQLLVCSQEAK |
| | KSAYCPYSHFPVGAALLTQEGRIFKGCNIENACYPLGICAERTAIQKAVSEGYKDFR |
| | AIAIASDMQDDFISPCGACRQVMREFGTNWPVYMTKPDGTYIVMTVQELLPSSFGP |
| | EDLQKTQ (SEQ ID NO: 287) |
| Ab61_HC_ | EVQLLESGGGLVQPGGSLRLSCAASGETESSYVMIWVRQAPGKGLEWVSSISGDSV |
| (G4S)3_LC_ | TTYYADSVKGRFTISRDNSKNTLYLQMNSLRAEDTAVYYCAKGPPTYHTNYYYM |
| (G4S)3 | DVWGKGTTVTVSSGGGGSGGGGSGGGGSDIQMTQSPSSVSASVGDRVTITCRASQ |
| linker_CDA | GISSWLAWYQQKPGKAPKLLIYAASSLQQSGVPSRFSGSGSGTDFTLTISSLQPEDF |
| | ATYYCQQTNSEPYTFGGGTKVEIKGGGGSGGGGSGGGGSMAQKRPACTLKPECV |
| | QQLLVCSQEAKKSAYCPYSHFPVGAALLTQEGRIFKGCNIENACYPLGICAERTAIQ |
| | KAVSEGYKDFRAIAIASDMQDDFISPCGACRQVMREFGTNWPVYMTKPDGTYIVM |
| | TVQELLPSSFGPEDLQKTQ (SEQ ID NO: 288) |
| Ab61_HC_ | EVQLLESGGGLVQPGGSLRLSCAASGETESSYVMIWVRQAPGKGLEWVSSISGDSV |
| (G4S)3_LC_ | TTYYADSVKGRFTISRDNSKNTLYLQMNSLRAEDTAVYYCAKGPPTYHTNYYYM |
| (G4S)4 | DVWGKGTTVTVSSGGGGSGGGGSGGGGSDIQMTQSPSSVSASVGDRVTITCRASQ |
| linker_CDA | GISSWLAWYQQKPGKAPKLLIYAASSLQQSGVPSRFSGSGSGTDFTLTISSLQPEDF |
| | ATYYCQQTNSEPYTFGGGTKVEIKGGGGSGGGGSGGGGSGGGGSMAQKRPACTL |
| | KPECVQQLLVCSQEAKKSAYCPYSHFPVGAALLTQEGRIFKGCNIENACYPLGICA |
| | ERTAIQKAVSEGYKDFRAIAIASDMQDDFISPCGACRQVMREFGTNWPVYMTKPD |
| | GTYIVMTVQELLPSSFGPEDLQKTQ (SEQ ID NO: 289) |
| Ab61_HC_ | EVQLLESGGGLVQPGGSLRLSCAASGETESSYVMIWVRQAPGKGLEWVSSISGDSV |
| (G4S)3_LC_ | TTYYADSVKGRFTISRDNSKNTLYLQMNSLRAEDTAVYYCAKGPPTYHTNYYYM |
| (G4S)5 | DVWGKGTTVTVSSGGGGSGGGGSGGGGSDIQMTQSPSSVSASVGDRVTITCRASQ |
| linker_CDA | GISSWLAWYQQKPGKAPKLLIYAASSLQQSGVPSRFSGSGSGTDFTLTISSLQPEDF |
| | ATYYCQQTNSEPYTFGGGTKVEIKGGGGSGGGGSGGGGSGGGGSGGGGSMAQKR |
| | PACTLKPECVQQLLVCSQEAKKSAYCPYSHFPVGAALLTQEGRIFKGCNIENACYP |
| | LGICAERTAIQKAVSEGYKDFRAIAIASDMQDDFISPCGACRQVMREFGTNWPVY |
| | MTKPDGTYIVMTVQELLPSSFGPEDLQKTQ (SEQ ID NO: 290) |
| Ab61_HC_ | EVQLLESGGGLVQPGGSLRLSCAASGETESSYVMIWVRQAPGKGLEWVSSISGDSV |
| (G4S)3_LC_ | TTYYADSVKGRFTISRDNSKNTLYLQMNSLRAEDTAVYYCAKGPPTYHTNYYYM |
| (G4S)6 | DVWGKGTTVTVSSGGGGSGGGGSGGGGSDIQMTQSPSSVSASVGDRVTITCRASQ |
| linker_CDA | GISSWLAWYQQKPGKAPKLLIYAASSLQQSGVPSRFSGSGSGTDFTLTISSLQPEDF |
| | ATYYCQQTNSEPYTFGGGTKVEIKGGGGSGGGGSGGGGSGGGGSGGGGSGGGGS |
| | MAQKRPACTLKPECVQQLLVCSQEAKKSAYCPYSHFPVGAALLTQEGRIFKGCNIE |
| | NACYPLGICAERTAIQKAVSEGYKDFRAIAIASDMQDDFISPCGACRQVMREFGTN |
| | WPVYMTKPDGTYIVMTVQELLPSSFGPEDLQKTQ (SEQ ID NO: 291) |
| Ab61_HC_ | EVQLLESGGGLVQPGGSLRLSCAASGETESSYVMIWVRQAPGKGLEWVSSISGDSV |
| (G4S)3_LC_ | TTYYADSVKGRFTISRDNSKNTLYLQMNSLRAEDTAVYYCAKGPPTYHTNYYYM |
| (G4S)7 | DVWGKGTTVTVSSGGGGSGGGGSGGGGSDIQMTQSPSSVSASVGDRVTITCRASQ |
| linker_CDA | GISSWLAWYQQKPGKAPKLLIYAASSLQQSGVPSRFSGSGSGTDFTLTISSLQPEDF |
| | ATYYCQQTNSEPYTFGGGTKVEIKGGGGSGGGGSGGGGSGGGGSGGGGSGGGGS |
| | GGGGSMAQKRPACTLKPECVQQLLVCSQEAKKSAYCPYSHFPVGAALLTQEGRIF |
| | KGCNIENACYPLGICAERTAIQKAVSEGYKDFRAIAIASDMQDDFISPCGACRQVM |
| | REFGTNWPVYMTKPDGTYIVMTVQELLPSSFGPEDLQKTQ (SEQ ID NO: 292) |
| Ab61_HC_ | EVQLLESGGGLVQPGGSLRLSCAASGETESSYVMIWVRQAPGKGLEWVSSISGDSV |
| (G4S)3_LC_ | TTYYADSVKGRFTISRDNSKNTLYLQMNSLRAEDTAVYYCAKGPPTYHTNYYYM |
| (G4S)8 | DVWGKGTTVTVSSGGGGSGGGGSGGGGSDIQMTQSPSSVSASVGDRVTITCRASQ |
| linker_CDA | GISSWLAWYQQKPGKAPKLLIYAASSLQQSGVPSRFSGSGSGTDFTLTISSLQPEDF |
| | ATYYCQQTNSEPYTFGGGTKVEIKGGGGSGGGGSGGGGSGGGGSGGGGSGGGGS |
| | GGGGSGGGGSMAQKRPACTLKPECVQQLLVCSQEAKKSAYCPYSHFPVGAALLT |
| | QEGRIFKGCNIENACYPLGICAERTAIQKAVSEGYKDFRAIAIASDMQDDFISPCGA |
| | CRQVMREFGTNWPVYMTKPDGTYIVMTVQELLPSSFGPEDLQKTQ (SEQ ID NO: |
| | 293) |
| Ab61_HC_ | EVQLLESGGGLVQPGGSLRLSCAASGETESSYVMIWVRQAPGKGLEWVSSISGDSV |
| (G4S)3_LC_ | TTYYADSVKGRFTISRDNSKNTLYLQMNSLRAEDTAVYYCAKGPPTYHTNYYYM |
| (G4S)9 | DVWGKGTTVTVSSGGGGSGGGGSGGGGSDIQMTQSPSSVSASVGDRVTITCRASQ |
| linker_CDA | GISSWLAWYQQKPGKAPKLLIYAASSLQQSGVPSRFSGSGSGTDFTLTISSLQPEDF |
| | ATYYCQQTNSEPYTFGGGTKVEIKGGGGSGGGGSGGGGSGGGGSGGGGSGGGGS |
| | GGGGSGGGGSGGGGSMAQKRPACTLKPECVQQLLVCSQEAKKSAYCPYSHFPVG |
| | AALLTQEGRIFKGCNIENACYPLGICAERTAIQKAVSEGYKDFRAIAIASDMQDDFI |
| | SPCGACRQVMREFGTNWPVYMTKPDGTYIVMTVQELLPSSFGPEDLQKTQ (SEQ |
| | ID NO: 294) |
| Ab61_HC_ | EVQLLESGGGLVQPGGSLRLSCAASGETESSYVMIWVRQAPGKGLEWVSSISGDSV |
| (G4S)3_LC_ | TTYYADSVKGRFTISRDNSKNTLYLQMNSLRAEDTAVYYCAKGPPTYHTNYYYM |
| (G4S)10 | DVWGKGTTVTVSSGGGGSGGGGSGGGGSDIQMTQSPSSVSASVGDRVTITCRASQ |
| linker_CDA | GISSWLAWYQQKPGKAPKLLIYAASSLQQSGVPSRFSGSGSGTDFTLTISSLQPEDF |
| | ATYYCQQTNSEPYTFGGGTKVEIKGGGGSGGGGSGGGGSGGGGSGGGGSGGGGS |
| | GGGGSGGGGSGGGGSGGGGSMAQKRPACTLKPECVQQLLVCSQEAKKSAYCPYS |
| | HFPVGAALLTQEGRIFKGCNIENACYPLGICAERTAIQKAVSEGYKDFRAIAIASDM |
| | QDDFISPCGACRQVMREFGTNWPVYMTKPDGTYIVMTVQELLPSSFGPEDLQKTQ |
| | (SEQ ID NO: 295) |
| Ab61_HC_ | EVQLLESGGGLVQPGGSLRLSCAASGETESSYVMIWVRQAPGKGLEWVSSISGDSV |
| (G4S)3_LC_ | TTYYADSVKGRFTISRDNSKNTLYLQMNSLRAEDTAVYYCAKGPPTYHTNYYYM |
| (G4S)11 | DVWGKGTTVTVSSGGGGSGGGGSGGGGSDIQMTQSPSSVSASVGDRVTITCRASQ |
| linker_CDA | GISSWLAWYQQKPGKAPKLLIYAASSLQQSGVPSRFSGSGSGTDFTLTISSLQPEDF |
| | ATYYCQQTNSEPYTFGGGTKVEIKGGGGSGGGGSGGGGSGGGGSGGGGSGGGGS |
| | GGGGSGGGGSGGGGSGGGGSGGGGSMAQKRPACTLKPECVQQLLVCSQEAKKSA |
| | YCPYSHFPVGAALLTQEGRIFKGCNIENACYPLGICAERTAIQKAVSEGYKDFRAIA |
| | IASDMQDDFISPCGACRQVMREFGTNWPVYMTKPDGTYIVMTVQELLPSSFGPED |
| | LQKTQ (SEQ ID NO: 296) |
| Ab61_HC_ | EVQLLESGGGLVQPGGSLRLSCAASGETESSYVMIWVRQAPGKGLEWVSSISGDSV |
| (G4S)3_LC_ | TTYYADSVKGRFTISRDNSKNTLYLQMNSLRAEDTAVYYCAKGPPTYHTNYYYM |
| (G4S)112 | DVWGKGTTVTVSSGGGGSGGGGSGGGGSDIQMTQSPSSVSASVGDRVTITCRASQ |
| linker_CDA | GISSWLAWYQQKPGKAPKLLIYAASSLQQSGVPSRFSGSGSGTDFTLTISSLQPEDF |
| | ATYYCQQTNSEPYTFGGGTKVEIKGGGGSGGGGSGGGGSGGGGSGGGGSGGGGS |
| | GGGGSGGGGSGGGGSGGGGSGGGGSGGGGSMAQKRPACTLKPECVQQLLVCSQE |
| | AKKSAYCPYSHFPVGAALLTQEGRIFKGCNIENACYPLGICAERTAIQKAVSEGYK |
| | DFRAIAIASDMQDDFISPCGACRQVMREFGTNWPVYMTKPDGTYIVMTVQELLPSS |
| | FGPEDLQKTQ (SEQ ID NO: 297) |
| Ab66_HC_ | EVQLVESGGGLVQPGGSLRLSCAASGETFSDHYMDWVRQAPGKGLASGETFSDH |
| (G4S)3_LC_G4S | YMDWVRQAPGKGLEWVGRIRNKASSYTTEYAASVKGRFTISRDDSKNSLYLQMN |
| linker_CDA | SLKTEDTAVYYCAREPKYWIDFDLWGRGTLVTVSSGGGGSGGGGSGGGGSDIQM |
| | TQSPSSLSASVGDRVTITCRASQSISSYLNWYQQKPGKAPKLLIYAASSLQSGVPSR |
| | FSGSGSGTDFTLTISSLQPEDFATYYCQQSYIAPYTFGGGTKVEIKGGGGSMAQKRP |
| | ACTLKPECVQQLLVCSQEAKKSAYCPYSHFPVGAALLTQEGRIFKGCNIENACYPL |
| | GICAERTAIQKAVSEGYKDFRAIAIASDMQDDFISPCGACRQVMREFGTNWPVYM |
| | TKPDGTYIVMTVQELLPSSFGPEDLQKTQ (SEQ ID NO: 298) |
| Ab66_HC_ | EVQLVESGGGLVQPGGSLRLSCAASGETFSDHYMDWVRQAPGKGLASGETFSDH |
| (G4S)3_LC_ | YMDWVRQAPGKGLEWVGRIRNKASSYTTEYAASVKGRFTISRDDSKNSLYLQMN |
| (G4S)3 | SLKTEDTAVYYCAREPKYWIDFDLWGRGTLVTVSSGGGGSGGGGSGGGGSDIQM |
| linker_CDA | TQSPSSLSASVGDRVTITCRASQSISSYLNWYQQKPGKAPKLLIYAASSLQSGVPSR |
| | FSGSGSGTDFTLTISSLQPEDFATYYCQQSYIAPYTFGGGTKVEIKGGGGSGGGGSG |
| | GGGSMAQKRPACTLKPECVQQLLVCSQEAKKSAYCPYSHFPVGAALLTQEGRIFK |
| | GCNIENACYPLGICAERTAIQKAVSEGYKDFRAIAIASDMQDDFISPCGACRQVMR |
| | EFGTNWPVYMTKPDGTYIVMTVQELLPSSFGPEDLQKTQ (SEQ ID NO: 299) |
| Ab66_HC_ | EVQLVESGGGLVQPGGSLRLSCAASGETFSDHYMDWVRQAPGKGLASGETFSDH |
| (G4S)3_LC_ | YMDWVRQAPGKGLEWVGRIRNKASSYTTEYAASVKGRFTISRDDSKNSLYLQMN |
| (G4S)4 | SLKTEDTAVYYCAREPKYWIDFDLWGRGTLVTVSSGGGGSGGGGSGGGGSDIQM |
| linker_CDA | TQSPSSLSASVGDRVTITCRASQSISSYLNWYQQKPGKAPKLLIYAASSLQSGVPSR |
| | FSGSGSGTDFTLTISSLQPEDFATYYCQQSYIAPYTFGGGTKVEIKGGGGSGGGGSG |
| | GGGSGGGGSMAQKRPACTLKPECVQQLLVCSQEAKKSAYCPYSHFPVGAALLTQ |
| | EGRIFKGCNIENACYPLGICAERTAIQKAVSEGYKDFRAIAIASDMQDDFISPCGAC |
| | RQVMREFGTNWPVYMTKPDGTYIVMTVQELLPSSFGPEDLQKTQ (SEQ ID NO: |
| | 300) |
| Ab66_HC_ | EVQLVESGGGLVQPGGSLRLSCAASGETFSDHYMDWVRQAPGKGLASGETFSDH |
| (G4S)3_LC_ | YMDWVRQAPGKGLEWVGRIRNKASSYTTEYAASVKGRFTISRDDSKNSLYLQMN |
| (G4S)5 | SLKTEDTAVYYCAREPKYWIDFDLWGRGTLVTVSSGGGGSGGGGSGGGGSDIQM |
| linker_CDA | TQSPSSLSASVGDRVTITCRASQSISSYLNWYQQKPGKAPKLLIYAASSLQSGVPSR |
| | FSGSGSGTDFTLTISSLQPEDFATYYCQQSYIAPYTFGGGTKVEIKGGGGSGGGGSG |
| | GGGSGGGGSGGGGSMAQKRPACTLKPECVQQLLVCSQEAKKSAYCPYSHFPVGA |
| | ALLTQEGRIFKGCNIENACYPLGICAERTAIQKAVSEGYKDFRAIAIASDMQDDFISP |
| | CGACRQVMREFGTNWPVYMTKPDGTYIVMTVQELLPSSFGPEDLQKTQ (SEQ ID |
| | NO: 301) |
| Ab66_HC_ | EVQLVESGGGLVQPGGSLRLSCAASGETFSDHYMDWVRQAPGKGLASGETFSDH |
| (G4S)3_LC_ | YMDWVRQAPGKGLEWVGRIRNKASSYTTEYAASVKGRFTISRDDSKNSLYLQMN |
| (G4S)6 | SLKTEDTAVYYCAREPKYWIDFDLWGRGTLVTVSSGGGGSGGGGSGGGGSDIQM |
| linker_CDA | TQSPSSLSASVGDRVTITCRASQSISSYLNWYQQKPGKAPKLLIYAASSLQSGVPSR |
| | FSGSGSGTDFTLTISSLQPEDFATYYCQQSYIAPYTFGGGTKVEIKGGGGSGGGGSG |
| | GGGSGGGGSGGGGSGGGGSMAQKRPACTLKPECVQQLLVCSQEAKKSAYCPYSH |
| | FPVGAALLTQEGRIFKGCNIENACYPLGICAERTAIQKAVSEGYKDFRAIAIASDMQ |
| | DDFISPCGACRQVMREFGTNWPVYMTKPDGTYIVMTVQELLPSSFGPEDLQKTQ |
| | (SEQ ID NO: 302) |
| Ab66_HC_ | EVQLVESGGGLVQPGGSLRLSCAASGETFSDHYMDWVRQAPGKGLASGETFSDH |
| (G4S)3_LC_ | YMDWVRQAPGKGLEWVGRIRNKASSYTTEYAASVKGRFTISRDDSKNSLYLQMN |
| (G4S)7 | SLKTEDTAVYYCAREPKYWIDFDLWGRGTLVTVSSGGGGSGGGGSGGGGSDIQM |
| linker_CDA | TQSPSSLSASVGDRVTITCRASQSISSYLNWYQQKPGKAPKLLIYAASSLQSGVPSR |
| | FSGSGSGTDFTLTISSLQPEDFATYYCQQSYIAPYTFGGGTKVEIKGGGGSGGGGSG |
| | GGGSGGGGSGGGGSGGGGSGGGGSMAQKRPACTLKPECVQQLLVCSQEAKKSAY |
| | CPYSHFPVGAALLTQEGRIFKGCNIENACYPLGICAERTAIQKAVSEGYKDFRAIAI |
| | ASDMQDDFISPCGACRQVMREFGTNWPVYMTKPDGTYIVMTVQELLPSSFGPEDL |
| | QKTQ (SEQ ID NO: 303) |
| Ab66_HC_ | EVQLVESGGGLVQPGGSLRLSCAASGETFSDHYMDWVRQAPGKGLASGETFSDH |
| (G4S)3_LC_ | YMDWVRQAPGKGLEWVGRIRNKASSYTTEYAASVKGRFTISRDDSKNSLYLQMN |
| (G4S)8 | SLKTEDTAVYYCAREPKYWIDFDLWGRGTLVTVSSGGGGSGGGGSGGGGSDIQM |
| linker_CDA | TQSPSSLSASVGDRVTITCRASQSISSYLNWYQQKPGKAPKLLIYAASSLQSGVPSR |
| | FSGSGSGTDFTLTISSLQPEDFATYYCQQSYIAPYTFGGGTKVEIKGGGGSGGGGSG |
| | GGGSGGGGSGGGGSGGGGSGGGGSGGGGSMAQKRPACTLKPECVQQLLVCSQEA |
| | KKSAYCPYSHFPVGAALLTQEGRIFKGCNIENACYPLGICAERTAIQKAVSEGYKDF |
| | RAIAIASDMQDDFISPCGACRQVMREFGTNWPVYMTKPDGTYIVMTVQELLPSSFG |
| | PEDLQKTQ (SEQ ID NO: 304) |
| Ab66_HC_ | EVQLVESGGGLVQPGGSLRLSCAASGETFSDHYMDWVRQAPGKGLASGETFSDH |
| (G4S)3_LC_ | YMDWVRQAPGKGLEWVGRIRNKASSYTTEYAASVKGRFTISRDDSKNSLYLQMN |
| (G4S)9 | SLKTEDTAVYYCAREPKYWIDFDLWGRGTLVTVSSGGGGSGGGGSGGGGSDIQM |
| linker_CDA | TQSPSSLSASVGDRVTITCRASQSISSYLNWYQQKPGKAPKLLIYAASSLQSGVPSR |
| | FSGSGSGTDFTLTISSLQPEDFATYYCQQSYIAPYTFGGGTKVEIKGGGGSGGGGSG |
| | GGGSGGGGSGGGGSGGGGSGGGGSGGGGSGGGGSMAQKRPACTLKPECVQQLL |
| | VCSQEAKKSAYCPYSHFPVGAALLTQEGRIFKGCNIENACYPLGICAERTAIQKAVS |
| | EGYKDFRAIAIASDMQDDFISPCGACRQVMREFGTNWPVYMTKPDGTYIVMTVQE |
| | LLPSSFGPEDLQKTQ (SEQ ID NO: 305) |
| Ab66_HC_ | EVQLVESGGGLVQPGGSLRLSCAASGETFSDHYMDWVRQAPGKGLASGETFSDH |
| (G4S)3_LC_ | YMDWVRQAPGKGLEWVGRIRNKASSYTTEYAASVKGRFTISRDDSKNSLYLQMN |
| (G4S)10 | SLKTEDTAVYYCAREPKYWIDFDLWGRGTLVTVSSGGGGSGGGGSGGGGSDIQM |
| linker_CDA | TQSPSSLSASVGDRVTITCRASQSISSYLNWYQQKPGKAPKLLIYAASSLQSGVPSR |
| | FSGSGSGTDFTLTISSLQPEDFATYYCQQSYIAPYTFGGGTKVEIKGGGGSGGGGSG |
| | GGGSGGGGSGGGGSGGGGSGGGGSGGGGSGGGGSGGGGSMAQKRPACTLKPEC |
| | VQQLLVCSQEAKKSAYCPYSHFPVGAALLTQEGRIFKGCNIENACYPLGICAERTAI |
| | QKAVSEGYKDFRAIAIASDMQDDFISPCGACRQVMREFGTNWPVYMTKPDGTYIV |
| | MTVQELLPSSFGPEDLQKTQ (SEQ ID NO: 306) |
| Ab66_HC_ | EVQLVESGGGLVQPGGSLRLSCAASGETFSDHYMDWVRQAPGKGLASGETFSDH |
| (G4S)3_LC_ | YMDWVRQAPGKGLEWVGRIRNKASSYTTEYAASVKGRFTISRDDSKNSLYLQMN |
| (G4S)11 | SLKTEDTAVYYCAREPKYWIDFDLWGRGTLVTVSSGGGGSGGGGSGGGGSDIQM |
| linker_CDA | TQSPSSLSASVGDRVTITCRASQSISSYLNWYQQKPGKAPKLLIYAASSLQSGVPSR |
| | FSGSGSGTDFTLTISSLQPEDFATYYCQQSYIAPYTFGGGTKVEIKGGGGSGGGGSG |
| | GGGSGGGGSGGGGSGGGGSGGGGSGGGGSGGGGSGGGGSGGGGSMAQKRPACT |
| | LKPECVQQLLVCSQEAKKSAYCPYSHFPVGAALLTQEGRIFKGCNIENACYPLGIC |
| | AERTAIQKAVSEGYKDFRAIAIASDMQDDFISPCGACRQVMREFGTNWPVYMTKP |
| | DGTYIVMTVQELLPSSFGPEDLQKTQ (SEQ ID NO: 307) |
| Ab66_HC_ | EVQLVESGGGLVQPGGSLRLSCAASGETFSDHYMDWVRQAPGKGLASGETFSDH |
| (G4S)3_LC_ | YMDWVRQAPGKGLEWVGRIRNKASSYTTEYAASVKGRFTISRDDSKNSLYLQMN |
| (G4S)112 | SLKTEDTAVYYCAREPKYWIDFDLWGRGTLVTVSSGGGGSGGGGSGGGGSDIQM |
| linker_CDA | TQSPSSLSASVGDRVTITCRASQSISSYLNWYQQKPGKAPKLLIYAASSLQSGVPSR |
| | FSGSGSGTDFTLTISSLQPEDFATYYCQQSYIAPYTFGGGTKVEIKGGGGSGGGGSG |
| | GGGSGGGGSGGGGSGGGGSGGGGSGGGGSGGGGSGGGGSGGGGSGGGGSMAQK |
| | RPACTLKPECVQQLLVCSQEAKKSAYCPYSHFPVGAALLTQEGRIFKGCNIENACY |
| | PLGICAERTAIQKAVSEGYKDFRAIAIASDMQDDFISPCGACRQVMREFGTNWPVY |
| | MTKPDGTYIVMTVQELLPSSFGPEDLQKTQ (SEQ ID NO: 308) |
| Ab68_HC_ | EVQLVESGGGLVQPGRSLRLSCTASGFTFSDHDMNWVRQAPGKGLEWVGRTRNA |
| (G4S)3_LC_G4S | AGSYTTEYAASVKGRFTISRDDSKNSLYLQMNSLKTEDTAVYYCAREPKYWIDFD |
| linker_CDA | LWGRGTLVTSSGGGGSGGGGSGGGGSDIQMTQSPSSLSASVGDRVTITCRASQSISS |
| | YLNWYQQKPGKAPKLLIYAASSLQSGVPSRFSGSGSGTDFTLTISSLQPEDFATYYC |
| | QQSYIAPYTFGGGTKVEIKGGGGSMAQKRPACTLKPECVQQLLVCSQEAKKSAYC |
| | PYSHFPVGAALLTQEGRIFKGCNIENACYPLGICAERTAIQKAVSEGYKDFRAIAIAS |
| | DMQDDFISPCGACRQVMREFGTNWPVYMTKPDGTYIVMTVQELLPSSFGPEDLQK |
| | TQ (SEQ ID NO: 309) |
| Ab68_HC_ | EVQLVESGGGLVQPGRSLRLSCTASGFTFSDHDMNWVRQAPGKGLEWVGRTRNA |
| (G4S)3_LC_ | AGSYTTEYAASVKGRFTISRDDSKNSLYLQMNSLKTEDTAVYYCAREPKYWIDFD |
| (G4S)3 | LWGRGTLVTSSGGGGSGGGGSGGGGSDIQMTQSPSSLSASVGDRVTITCRASQSISS |
| linker_CDA | YLNWYQQKPGKAPKLLIYAASSLQSGVPSRFSGSGSGTDFTLTISSLQPEDFATYYC |
| | QQSYIAPYTFGGGTKVEIKGGGGSGGGGSGGGGSMAQKRPACTLKPECVQQLLVC |
| | SQEAKKSAYCPYSHFPVGAALLTQEGRIFKGCNIENACYPLGICAERTAIQKAVSEG |
| | YKDFRAIAIASDMQDDFISPCGACRQVMREFGTNWPVYMTKPDGTYIVMTVQELL |
| | PSSFGPEDLQKTQ (SEQ ID NO: 310) |
| Ab68_HC_ | EVQLVESGGGLVQPGRSLRLSCTASGFTFSDHDMNWVRQAPGKGLEWVGRTRNA |
| (G4S)3_LC_ | AGSYTTEYAASVKGRFTISRDDSKNSLYLQMNSLKTEDTAVYYCAREPKYWIDFD |
| (G4S)4 | LWGRGTLVTSSGGGGSGGGGSGGGGSDIQMTQSPSSLSASVGDRVTITCRASQSISS |
| linker_CDA | YLNWYQQKPGKAPKLLIYAASSLQSGVPSRFSGSGSGTDFTLTISSLQPEDFATYYC |
| | QQSYIAPYTFGGGTKVEIKGGGGSGGGGSGGGGSGGGGSMAQKRPACTLKPECVQ |
| | QLLVCSQEAKKSAYCPYSHFPVGAALLTQEGRIFKGCNIENACYPLGICAERTAIQK |
| | AVSEGYKDFRAIAIASDMQDDFISPCGACRQVMREFGTNWPVYMTKPDGTYIVMT |
| | VQELLPSSFGPEDLQKTQ (SEQ ID NO: 311) |
| Ab68_HC_ | EVQLVESGGGLVQPGRSLRLSCTASGFTFSDHDMNWVRQAPGKGLEWVGRTRNA |
| (G4S)3_LC_ | AGSYTTEYAASVKGRFTISRDDSKNSLYLQMNSLKTEDTAVYYCAREPKYWIDFD |
| (G4S)5 | LWGRGTLVTSSGGGGSGGGGSGGGGSDIQMTQSPSSLSASVGDRVTITCRASQSISS |
| linker_CDA | YLNWYQQKPGKAPKLLIYAASSLQSGVPSRFSGSGSGTDFTLTISSLQPEDFATYYC |
| | QQSYIAPYTFGGGTKVEIKGGGGSGGGGSGGGGSGGGGSGGGGSMAQKRPACTL |
| | KPECVQQLLVCSQEAKKSAYCPYSHFPVGAALLTQEGRIFKGCNIENACYPLGICA |
| | ERTAIQKAVSEGYKDFRAIAIASDMQDDFISPCGACRQVMREFGTNWPVYMTKPD |
| | GTYIVMTVQELLPSSFGPEDLQKTQ (SEQ ID NO: 312) |
| Ab68_HC_ | EVQLVESGGGLVQPGRSLRLSCTASGFTFSDHDMNWVRQAPGKGLEWVGRTRNA |
| (G4S)3_LC_ | AGSYTTEYAASVKGRFTISRDDSKNSLYLQMNSLKTEDTAVYYCAREPKYWIDFD |
| (G4S)6 | LWGRGTLVTSSGGGGSGGGGSGGGGSDIQMTQSPSSLSASVGDRVTITCRASQSISS |
| linker_CDA | YLNWYQQKPGKAPKLLIYAASSLQSGVPSRFSGSGSGTDFTLTISSLQPEDFATYYC |
| | QQSYIAPYTFGGGTKVEIKGGGGSGGGGSGGGGSGGGGSGGGGSGGGGSMAQKR |
| | PACTLKPECVQQLLVCSQEAKKSAYCPYSHFPVGAALLTQEGRIFKGCNIENACYP |
| | LGICAERTAIQKAVSEGYKDFRAIAIASDMQDDFISPCGACRQVMREFGTNWPVY |
| | MTKPDGTYIVMTVQELLPSSFGPEDLQKTQ (SEQ ID NO: 313) |
| Ab68_HC_ | EVQLVESGGGLVQPGRSLRLSCTASGFTFSDHDMNWVRQAPGKGLEWVGRTRNA |
| (G4S)3_LC_ | AGSYTTEYAASVKGRFTISRDDSKNSLYLQMNSLKTEDTAVYYCAREPKYWIDFD |
| (G4S)7 | LWGRGTLVTSSGGGGSGGGGSGGGGSDIQMTQSPSSLSASVGDRVTITCRASQSISS |
| linker_CDA | YLNWYQQKPGKAPKLLIYAASSLQSGVPSRFSGSGSGTDFTLTISSLQPEDFATYYC |
| | QQSYIAPYTFGGGTKVEIKGGGGSGGGGSGGGGSGGGGSGGGGSGGGGSGGGGS |
| | MAQKRPACTLKPECVQQLLVCSQEAKKSAYCPYSHFPVGAALLTQEGRIFKGCNIE |
| | NACYPLGICAERTAIQKAVSEGYKDFRAIAIASDMQDDFISPCGACRQVMREFGTN |
| | WPVYMTKPDGTYIVMTVQELLPSSFGPEDLQKTQ (SEQ ID NO: 314) |
| Ab68_HC_ | EVQLVESGGGLVQPGRSLRLSCTASGFTFSDHDMNWVRQAPGKGLEWVGRTRNA |
| (G4S)3_LC_ | AGSYTTEYAASVKGRFTISRDDSKNSLYLQMNSLKTEDTAVYYCAREPKYWIDFD |
| (G4S)8 | LWGRGTLVTSSGGGGSGGGGSGGGGSDIQMTQSPSSLSASVGDRVTITCRASQSISS |
| linker_CDA | YLNWYQQKPGKAPKLLIYAASSLQSGVPSRFSGSGSGTDFTLTISSLQPEDFATYYC |
| | QQSYIAPYTFGGGTKVEIKGGGGSGGGGSGGGGSGGGGSGGGGSGGGGSGGGGS |
| | GGGGSMAQKRPACTLKPECVQQLLVCSQEAKKSAYCPYSHFPVGAALLTQEGRIF |
| | KGCNIENACYPLGICAERTAIQKAVSEGYKDFRAIAIASDMQDDFISPCGACRQVM |
| | REFGTNWPVYMTKPDGTYIVMTVQELLPSSFGPEDLQKTQ (SEQ ID NO: 315) |
| Ab68_HC_ | EVQLVESGGGLVQPGRSLRLSCTASGFTFSDHDMNWVRQAPGKGLEWVGRTRNA |
| (G4S)3_LC_ | AGSYTTEYAASVKGRFTISRDDSKNSLYLQMNSLKTEDTAVYYCAREPKYWIDFD |
| (G4S)9 | LWGRGTLVTSSGGGGSGGGGSGGGGSDIQMTQSPSSLSASVGDRVTITCRASQSISS |
| linker_CDA | YLNWYQQKPGKAPKLLIYAASSLQSGVPSRFSGSGSGTDFTLTISSLQPEDFATYYC |
| | QQSYIAPYTFGGGTKVEIKGGGGSGGGGSGGGGSGGGGSGGGGSGGGGSGGGGS |
| | GGGGSGGGGSMAQKRPACTLKPECVQQLLVCSQEAKKSAYCPYSHFPVGAALLT |
| | QEGRIFKGCNIENACYPLGICAERTAIQKAVSEGYKDFRAIAIASDMQDDFISPCGA |
| | CRQVMREFGTNWPVYMTKPDGTYIVMTVQELLPSSFGPEDLQKTQ (SEQ ID NO: |
| | 316) |
| Ab68_HC_ | EVQLVESGGGLVQPGRSLRLSCTASGFTFSDHDMNWVRQAPGKGLEWVGRTRNA |
| (G4S)3_LC_ | AGSYTTEYAASVKGRFTISRDDSKNSLYLQMNSLKTEDTAVYYCAREPKYWIDFD |
| (G4S)10 | LWGRGTLVTSSGGGGSGGGGSGGGGSDIQMTQSPSSLSASVGDRVTITCRASQSISS |
| linker_CDA | YLNWYQQKPGKAPKLLIYAASSLQSGVPSRFSGSGSGTDFTLTISSLQPEDFATYYC |
| | QQSYIAPYTFGGGTKVEIKGGGGSGGGGSGGGGSGGGGSGGGGSGGGGSGGGGS |
| | GGGGSGGGGSGGGGSMAQKRPACTLKPECVQQLLVCSQEAKKSAYCPYSHFPVG |
| | AALLTQEGRIFKGCNIENACYPLGICAERTAIQKAVSEGYKDFRAIAIASDMQDDFI |
| | SPCGACRQVMREFGTNWPVYMTKPDGTYIVMTVQELLPSSFGPEDLQKTQ (SEQ |
| | ID NO: 317) |
| Ab68_HC_ | EVQLVESGGGLVQPGRSLRLSCTASGFTFSDHDMNWVRQAPGKGLEWVGRTRNA |
| (G4S)3_LC_ | AGSYTTEYAASVKGRFTISRDDSKNSLYLQMNSLKTEDTAVYYCAREPKYWIDFD |
| (G4S)11 | LWGRGTLVTSSGGGGSGGGGSGGGGSDIQMTQSPSSLSASVGDRVTITCRASQSISS |
| linker_CDA | YLNWYQQKPGKAPKLLIYAASSLQSGVPSRFSGSGSGTDFTLTISSLQPEDFATYYC |
| | QQSYIAPYTFGGGTKVEIKGGGGSGGGGSGGGGSGGGGSGGGGSGGGGSGGGGS |
| | GGGGSGGGGSGGGGSGGGGSMAQKRPACTLKPECVQQLLVCSQEAKKSAYCPYS |
| | HFPVGAALLTQEGRIFKGCNIENACYPLGICAERTAIQKAVSEGYKDFRAIAIASDM |
| | QDDFISPCGACRQVMREFGTNWPVYMTKPDGTYIVMTVQELLPSSFGPEDLQKTQ |
| | (SEQ ID NO: 318) |
| Ab68_HC_ | EVQLVESGGGLVQPGRSLRLSCTASGFTFSDHDMNWVRQAPGKGLEWVGRTRNA |
| (G4S)3_LC_ | AGSYTTEYAASVKGRFTISRDDSKNSLYLQMNSLKTEDTAVYYCAREPKYWIDFD |
| (G4S)112 | LWGRGTLVTSSGGGGSGGGGSGGGGSDIQMTQSPSSLSASVGDRVTITCRASQSISS |
| linker_CDA | YLNWYQQKPGKAPKLLIYAASSLQSGVPSRFSGSGSGTDFTLTISSLQPEDFATYYC |
| | QQSYIAPYTFGGGTKVEIKGGGGSGGGGSGGGGSGGGGSGGGGSGGGGSGGGGS |
| | GGGGSGGGGSGGGGSGGGGSGGGGSMAQKRPACTLKPECVQQLLVCSQEAKKSA |
| | YCPYSHFPVGAALLTQEGRIFKGCNIENACYPLGICAERTAIQKAVSEGYKDFRAIA |
| | IASDMQDDFISPCGACRQVMREFGTNWPVYMTKPDGTYIVMTVQELLPSSFGPED |
| | LQKTQ (SEQ ID NO: 319) |
| Ab69_HC_ | DIQMTQSPSSLSASVGDRVTITCRASQSISSYLNWYQQKPGKAPKLLIYAASSLQSG |
| (G4S)3_LC_G4S | VPSRFSGSGSGTDFTLTISSLQPEDFATYYCQQSYIAPYIFGGGTKVEIKGGGGSGGG |
| linker_CDA | GSGGGGSEVQLVESGGGLVQPGGSLRLSCAASGETFVDHDMDWVRQAPGKGLE |
| | WVGRTRNKLGSYTTEYAASVKGRETGRDDSKNSLYLQMNSLKTEDTAVYYCARE |
| | PKYWIDFDLWGRGTLVTVSSGGGGSMAQKRPACTLKPECVQQLLVCSQEAKKSA |
| | YCPYSHFPVGAALLTQEGRIFKGCNIENACYPLGICAERTAIQKAVSEGYKDFRAIA |
| | IASDMQDDFISPCGACRQVMREFGTNWPVYMTKPDGTYIVMTVQELLPSSFGPED |
| | LQKTQ (SEQ ID NO: 320) |
| Ab69_HC_ | DIQMTQSPSSLSASVGDRVTITCRASQSISSYLNWYQQKPGKAPKLLIYAASSLQSG |
| (G4S)3_LC_ | VPSRFSGSGSGTDFTLTISSLQPEDFATYYCQQSYIAPYIFGGGTKVEIKGGGGSGGG |
| (G4S)3 | GSGGGGSEVQLVESGGGLVQPGGSLRLSCAASGETFVDHDMDWVRQAPGKGLE |
| linker_CDA | WVGRTRNKLGSYTTEYAASVKGRETGRDDSKNSLYLQMNSLKTEDTAVYYCARE |
| | PKYWIDFDLWGRGTLVTVSSGGGGSGGGGSGGGGSMAQKRPACTLKPECVQQLL |
| | VCSQEAKKSAYCPYSHFPVGAALLTQEGRIFKGCNIENACYPLGICAERTAIQKAVS |
| | EGYKDFRAIAIASDMQDDFISPCGACRQVMREFGTNWPVYMTKPDGTYIVMTVQE |
| | LLPSSFGPEDLQKTQ (SEQ ID NO: 321) |
| Ab69_HC_ | DIQMTQSPSSLSASVGDRVTITCRASQSISSYLNWYQQKPGKAPKLLIYAASSLQSG |
| (G4S)3_LC_ | VPSRFSGSGSGTDFTLTISSLQPEDFATYYCQQSYIAPYIFGGGTKVEIKGGGGSGGG |
| (G4S)4 | GSGGGGSEVQLVESGGGLVQPGGSLRLSCAASGETFVDHDMDWVRQAPGKGLE |
| linker_CDA | WVGRTRNKLGSYTTEYAASVKGRETGRDDSKNSLYLQMNSLKTEDTAVYYCARE |
| | PKYWIDFDLWGRGTLVTVSSGGGGSGGGGSGGGGSGGGGSMAQKRPACTLKPEC |
| | VQQLLVCSQEAKKSAYCPYSHFPVGAALLTQEGRIFKGCNIENACYPLGICAERTAI |
| | QKAVSEGYKDFRAIAIASDMQDDFISPCGACRQVMREFGTNWPVYMTKPDGTYIV |
| | MTVQELLPSSFGPEDLQKTQ (SEQ ID NO: 322) |
| Ab69_HC_ | DIQMTQSPSSLSASVGDRVTITCRASQSISSYLNWYQQKPGKAPKLLIYAASSLQSG |
| (G4S)3_LC_ | VPSRFSGSGSGTDFTLTISSLQPEDFATYYCQQSYIAPYIFGGGTKVEIKGGGGSGGG |
| (G4S)5 | GSGGGGSEVQLVESGGGLVQPGGSLRLSCAASGETFVDHDMDWVRQAPGKGLE |
| linker_CDA | WVGRTRNKLGSYTTEYAASVKGRETGRDDSKNSLYLQMNSLKTEDTAVYYCARE |
| | PKYWIDFDLWGRGTLVTVSSGGGGSGGGGSGGGGSGGGGSGGGGSMAQKRPAC |
| | TLKPECVQQLLVCSQEAKKSAYCPYSHFPVGAALLTQEGRIFKGCNIENACYPLGIC |
| | AERTAIQKAVSEGYKDFRAIAIASDMQDDFISPCGACRQVMREFGTNWPVYMTKP |
| | DGTYIVMTVQELLPSSFGPEDLQKTQ (SEQ ID NO: 323) |
| Ab69_HC_ | DIQMTQSPSSLSASVGDRVTITCRASQSISSYLNWYQQKPGKAPKLLIYAASSLQSG |
| (G4S)3_LC_ | VPSRFSGSGSGTDFTLTISSLQPEDFATYYCQQSYIAPYIFGGGTKVEIKGGGGSGGG |
| (G4S)6 | GSGGGGSEVQLVESGGGLVQPGGSLRLSCAASGETFVDHDMDWVRQAPGKGLE |
| linker_CDA | WVGRTRNKLGSYTTEYAASVKGRETGRDDSKNSLYLQMNSLKTEDTAVYYCARE |
| | PKYWIDFDLWGRGTLVTVSSGGGGSGGGGSGGGGSGGGGSGGGGSGGGGSMAQ |
| | KRPACTLKPECVQQLLVCSQEAKKSAYCPYSHFPVGAALLTQEGRIFKGCNIENAC |
| | YPLGICAERTAIQKAVSEGYKDFRAIAIASDMQDDFISPCGACRQVMREFGTNWPV |
| | YMTKPDGTYIVMTVQELLPSSFGPEDLQKTQ (SEQ ID NO: 324) |
| Ab69_HC_ | DIQMTQSPSSLSASVGDRVTITCRASQSISSYLNWYQQKPGKAPKLLIYAASSLQSG |
| (G4S)3_LC_ | VPSRFSGSGSGTDFTLTISSLQPEDFATYYCQQSYIAPYIFGGGTKVEIKGGGGSGGG |
| (G4S)7 | GSGGGGSEVQLVESGGGLVQPGGSLRLSCAASGETFVDHDMDWVRQAPGKGLE |
| linker_CDA | WVGRTRNKLGSYTTEYAASVKGRETGRDDSKNSLYLQMNSLKTEDTAVYYCARE |
| | PKYWIDFDLWGRGTLVTVSSGGGGSGGGGSGGGGSGGGGSGGGGSGGGGSGGG |
| | GSMAQKRPACTLKPECVQQLLVCSQEAKKSAYCPYSHFPVGAALLTQEGRIFKGC |
| | NIENACYPLGICAERTAIQKAVSEGYKDFRAIAIASDMQDDFISPCGACRQVMREFG |
| | TNWPVYMTKPDGTYIVMTVQELLPSSFGPEDLQKTQ (SEQ ID NO: 325) |
| Ab69_HC_ | DIQMTQSPSSLSASVGDRVTITCRASQSISSYLNWYQQKPGKAPKLLIYAASSLQSG |
| (G4S)3_LC_ | VPSRFSGSGSGTDFTLTISSLQPEDFATYYCQQSYIAPYIFGGGTKVEIKGGGGSGGG |
| (G4S)8 | GSGGGGSEVQLVESGGGLVQPGGSLRLSCAASGETFVDHDMDWVRQAPGKGLE |
| linker_CDA | WVGRTRNKLGSYTTEYAASVKGRETGRDDSKNSLYLQMNSLKTEDTAVYYCARE |
| | PKYWIDFDLWGRGTLVTVSSGGGGSGGGGSGGGGSGGGGSGGGGSGGGGSGGG |
| | GSGGGGSMAQKRPACTLKPECVQQLLVCSQEAKKSAYCPYSHFPVGAALLTQEGR |
| | IFKGCNIENACYPLGICAERTAIQKAVSEGYKDFRAIAIASDMQDDFISPCGACRQV |
| | [sequence omitted] (SEQ ID NO: 326) |
| Ab69_HC_ | DIQMTQSPSSLSASVGDRVTITCRASQSISSYLNWYQQKPGKAPKLLIYAASSLQSG |
| (G4S)3_LC_ | VPSRFSGSGSGTDFTLTISSLQPEDFATYYCQQSYIAPYIFGGGTKVEIKGGGGSGGG |
| (G4S)9 | GSGGGGSEVQLVESGGGLVQPGGSLRLSCAASGETFVDHDMDWVRQAPGKGLE |
| linker_CDA | WVGRTRNKLGSYTTEYAASVKGRETGRDDSKNSLYLQMNSLKTEDTAVYYCARE |
| | PKYWIDFDLWGRGTLVTVSSGGGGSGGGGSGGGGSGGGGSGGGGSGGGGSGGG |
| | GSGGGGSGGGGSMAQKRPACTLKPECVQQLLVCSQEAKKSAYCPYSHFPVGAAL |
| | LTQEGRIFKGCNIENACYPLGICAERTAIQKAVSEGYKDFRAIAIASDMQDDFISPCG |
| | ACRQVMREFGTNWPVYMTKPDGTYIVMTVQELLPSSFGPEDLQKTQ (SEQ ID NO: |
| | 327) |
| Ab69_HC_ | DIQMTQSPSSLSASVGDRVTITCRASQSISSYLNWYQQKPGKAPKLLIYAASSLQSG |
| (G4S)3_LC_ | VPSRFSGSGSGTDFTLTISSLQPEDFATYYCQQSYIAPYIFGGGTKVEIKGGGGSGGG |
| (G4S)10 | GSGGGGSEVQLVESGGGLVQPGGSLRLSCAASGETFVDHDMDWVRQAPGKGLE |
| linker_CDA | WVGRTRNKLGSYTTEYAASVKGRETGRDDSKNSLYLQMNSLKTEDTAVYYCARE |
| | PKYWIDFDLWGRGTLVTVSSGGGGSGGGGSGGGGSGGGGSGGGGSGGGGSGGG |
| | GSGGGGSGGGGSGGGGSMAQKRPACTLKPECVQQLLVCSQEAKKSAYCPYSHFP |
| | VGAALLTQEGRIFKGCNIENACYPLGICAERTAIQKAVSEGYKDFRAIAIASDMQD |
| | DFISPCGACRQVMREFGTNWPVYMTKPDGTYIVMTVQELLPSSFGPEDLQKTQ |
| | (SEQ ID NO: 328) |
| Ab69_HC_ | DIQMTQSPSSLSASVGDRVTITCRASQSISSYLNWYQQKPGKAPKLLIYAASSLQSG |
| (G4S)3_LC_ | VPSRFSGSGSGTDFTLTISSLQPEDFATYYCQQSYIAPYIFGGGTKVEIKGGGGSGGG |
| (G4S)11 | GSGGGGSEVQLVESGGGLVQPGGSLRLSCAASGETFVDHDMDWVRQAPGKGLE |
| linker_CDA | WVGRTRNKLGSYTTEYAASVKGRETGRDDSKNSLYLQMNSLKTEDTAVYYCARE |
| | PKYWIDFDLWGRGTLVTVSSGGGGSGGGGSGGGGSGGGGSGGGGSGGGGSGGG |
| | GSGGGGSGGGGSGGGGSGGGGSMAQKRPACTLKPECVQQLLVCSQEAKKSAYCP |
| | YSHFPVGAALLTQEGRIFKGCNIENACYPLGICAERTAIQKAVSEGYKDFRAIAIAS |
| | DMQDDFISPCGACRQVMREFGTNWPVYMTKPDGTYIVMTVQELLPSSFGPEDLQK |
| | TQ (SEQ ID NO: 329) |
| Ab69_HC_ | DIQMTQSPSSLSASVGDRVTITCRASQSISSYLNWYQQKPGKAPKLLIYAASSLQSG |
| (G4S)3_LC_ | VPSRFSGSGSGTDFTLTISSLQPEDFATYYCQQSYIAPYIFGGGTKVEIKGGGGSGGG |
| (G4S)112 | GSGGGGSEVQLVESGGGLVQPGGSLRLSCAASGETFVDHDMDWVRQAPGKGLE |
| linker_CDA | WVGRTRNKLGSYTTEYAASVKGRETGRDDSKNSLYLQMNSLKTEDTAVYYCARE |
| | PKYWIDFDLWGRGTLVTVSSGGGGSGGGGSGGGGSGGGGSGGGGSGGGGSGGG |
| | GSGGGGSGGGGSGGGGSGGGGSGGGGSMAQKRPACTLKPECVQQLLVCSQEAKK |
| | SAYCPYSHFPVGAALLTQEGRIFKGCNIENACYPLGICAERTAIQKAVSEGYKDFRA |
| | IAIASDMQDDFISPCGACRQVMREFGTNWPVYMTKPDGTYIVMTVQELLPSSFGPE |
| | DLQKTQ (SEQ ID NO: 330) |
| CDA_G4S | MAQKRPACTLKPECVQQLLVCSQEAKKSAYCPYSHFPVGAALLTQEGRIFKGCNIE |
| linker_Ab58_ | NACYPLGICAERTAIQKAVSEGYKDFRAIAIASDMQDDFISPCGACRQVMREFGTN |
| LC_(G4S)3_ | WPVYMTKPDGTYIVMTVQELLPSSFGPEDLQKTQGGGGSDIQMTQSPSSVSASVG |
| HC | DRVTITCRASQGISSWLAWYQQKPGKAPKLLLIYAASSLQSGVPSRFSGSGSGTDFT |
| | LTISSLQPEDFATYYCQQTNSFPYTFGGGTKVEIKGGGGSGGGGSGGGGSEVQLLE |
| | SGGGLVQPGGSLRLSCAASGETFSNYAMSWVRQAPGKGLEWVSAISGSGGSTYYA |
| | DSVKGRFTISRDNSKNTLYLQMNSLRAEDTAVYYCAKGPPTYHTNYYYMDVWGK |
| | GTTVTVSS (SEQ ID NO: 331) |
| CDA_G4S | MAQKRPACTLKPECVQQLLVCSQEAKKSAYCPYSHFPVGAALLTQEGRIFKGCNIE |
| linker_Ab61_ | NACYPLGICAERTAIQKAVSEGYKDFRAIAIASDMQDDFISPCGACRQVMREFGTN |
| LC_(G4S)3_ | WPVYMTKPDGTYIVMTVQELLPSSFGPEDLQKTQGGGGSDIQMTQSPSSVSASVG |
| HC | DRVTITCRASQGISSWLAWYQQKPGKAPKLLIYAASSLQQSGVPSRFSGSGSGTDF |
| | TLTISSLQPEDFATYYCQQTNSEPYTFGGGTKVEIKGGGGSGGGGSGGGGSEVQLL |
| | ESGGGLVQPGGSLRLSCAASGETESSYVMIWVRQAPGKGLEWVSSISGDSVTTYY |
| | ADSVKGRFTISRDNSKNTLYLQMNSLRAEDTAVYYCAKGPPTYHTNYYYMDVWG |
| | KGTTVTVSS (SEQ ID NO: 332) |
| CDA_G4S | MAQKRPACTLKPECVQQLLVCSQEAKKSAYCPYSHFPVGAALLTQEGRIFKGCNIE |
| linker_Ab66_ | NACYPLGICAERTAIQKAVSEGYKDFRAIAIASDMQDDFISPCGACRQVMREFGTN |
| LC_(G4S)3_ | WPVYMTKPDGTYIVMTVQELLPSSFGPEDLQKTQGGGGSDIQMTQSPSSLSASVG |
| HC | DRVTITCRASQSISSYLNWYQQKPGKAPKLLIYAASSLQSGVPSRFSGSGSGTDFTL |
| | TISSLQPEDFATYYCQQSYIAPYTFGGGTKVEIKGGGGSGGGGSGGGGSEVQLVES |
| | GGGLVQPGGSLRLSCAASGETFSDHYMDWVRQAPGKGLASGETFSDHYMDWVR |
| | QAPGKGLEWVGRIRNKASSYTTEYAASVKGRFTISRDDSKNSLYLQMNSLKTEDT |
| | AVYYCAREPKYWIDFDLWGRGTLVTVSS (SEQ ID NO: 333) |
| CDA_G4S | MAQKRPACTLKPECVQQLLVCSQEAKKSAYCPYSHFPVGAALLTQEGRIFKGCNIE |
| linker_Ab68_ | NACYPLGICAERTAIQKAVSEGYKDFRAIAIASDMQDDFISPCGACRQVMREFGTN |
| LC_(G4S)3_ | WPVYMTKPDGTYIVMTVQELLPSSFGPEDLQKTQGGGGSDIQMTQSPSSLSASVG |
| HC | DRVTITCRASQSISSYLNWYQQKPGKAPKLLIYAASSLQSGVPSRFSGSGSGTDFTL |
| | TISSLQPEDFATYYCQQSYIAPYTFGGGTKVEIKGGGGSGGGGSGGGGSEVQLVES |
| | GGGLVQPGRSLRLSCTASGFTFSDHDMNWVRQAPGKGLEWVGRTRNAAGSYTTE |
| | YAASVKGRFTISRDDSKNSLYLQMNSLKTEDTAVYYCAREPKYWIDFDLWGRGTL |
| | VTSS (SEQ ID NO: 334) |
| CDA_G4S | MAQKRPACTLKPECVQQLLVCSQEAKKSAYCPYSHFPVGAALLTQEGRIFKGCNIE |
| linker_Ab69_ | NACYPLGICAERTAIQKAVSEGYKDFRAIAIASDMQDDFISPCGACRQVMREFGTN |
| LC_(G4S)3_ | WPVYMTKPDGTYIVMTVQELLPSSFGPEDLQKTQGGGGSEVQLVESGGGLVQPGG |
| HC | SLRLSCAASGETFVDHDMDWVRQAPGKGLEWVGRTRNKLGSYTTEYAASVKGRE |
| | TGRDDSKNSLYLQMNSLKTEDTAVYYCAREPKYWIDFDLWGRGTLVTVSSGGGG |
| | SGGGGSGGGGSDIQMTQSPSSLSASVGDRVTITCRASQSISSYLNWYQQKPGKAPK |
| | LLIYAASSLQSGVPSRFSGSGSGTDFTLTISSLQPEDFATYYCQQSYIAPYIFGGGTK |
| | VEIK (SEQ ID NO: 335) |
| CDA_(G4S)3 | MAQKRPACTLKPECVQQLLVCSQEAKKSAYCPYSHFPVGAALLTQEGRIFKGCNIE |
| linker_Ab58_ | NACYPLGICAERTAIQKAVSEGYKDFRAIAIASDMQDDFISPCGACRQVMREFGTN |
| LC_(G4S)3_ | WPVYMTKPDGTYIVMTVQELLPSSFGPEDLQKTQGGGGSGGGGSGGGGSDIQMT |
| HC | QSPSSVSASVGDRVTITCRASQGISSWLAWYQQKPGKAPKLLLIYAASSLQSGVPSR |
| | FSGSGSGTDFTLTISSLQPEDFATYYCQQTNSFPYTFGGGTKVEIKGGGGSGGGGSG |
| | GGGSEVQLLESGGGLVQPGGSLRLSCAASGETFSNYAMSWVRQAPGKGLEWVSAI |
| | SGSGGSTYYADSVKGRFTISRDNSKNTLYLQMNSLRAEDTAVYYCAKGPPTYHTN |
| | YYYMDVWGKGTTVTVSS (SEQ ID NO: 336) |
| CDA_(G4S)3 | MAQKRPACTLKPECVQQLLVCSQEAKKSAYCPYSHFPVGAALLTQEGRIFKGCNIE |
| linker_Ab61_ | NACYPLGICAERTAIQKAVSEGYKDFRAIAIASDMQDDFISPCGACRQVMREFGTN |
| LC_(G4S)3_ | WPVYMTKPDGTYIVMTVQELLPSSFGPEDLQKTQGGGGSGGGGSGGGGSDIQMT |
| HC | QSPSSVSASVGDRVTITCRASQGISSWLAWYQQKPGKAPKLLIYAASSLQQSGVPS |
| | RFSGSGSGTDFTLTISSLQPEDFATYYCQQTNSEPYTFGGGTKVEIKGGGGSGGGGS |
| | GGGGSEVQLLESGGGLVQPGGSLRLSCAASGETESSYVMIWVRQAPGKGLEWVSS |
| | ISGDSVTTYYADSVKGRFTISRDNSKNTLYLQMNSLRAEDTAVYYCAKGPPTYHT |
| | NYYYMDVWGKGTTVTVSS (SEQ ID NO: 337) |
| CDA_(G4S)3 | MAQKRPACTLKPECVQQLLVCSQEAKKSAYCPYSHFPVGAALLTQEGRIFKGCNIE |
| linker_Ab66_ | NACYPLGICAERTAIQKAVSEGYKDFRAIAIASDMQDDFISPCGACRQVMREFGTN |
| LC_(G4S)3_ | WPVYMTKPDGTYIVMTVQELLPSSFGPEDLQKTQGGGGSGGGGSGGGGSDIQMT |
| HC | QSPSSLSASVGDRVTITCRASQSISSYLNWYQQKPGKAPKLLIYAASSLQSGVPSRFS |
| | GSGSGTDFTLTISSLQPEDFATYYCQQSYIAPYTFGGGTKVEIKGGGGSGGGGSGG |
| | GGSEVQLVESGGGLVQPGGSLRLSCAASGETFSDHYMDWVRQAPGKGLASGETFS |
| | DHYMDWVRQAPGKGLEWVGRIRNKASSYTTEYAASVKGRFTISRDDSKNSLYLQ |
| | MNSLKTEDTAVYYCAREPKYWIDFDLWGRGTLVTVSS (SEQ ID NO: 338) |
| CDA_(G4S)3 | MAQKRPACTLKPECVQQLLVCSQEAKKSAYCPYSHFPVGAALLTQEGRIFKGCNIE |
| linker_Ab68_ | NACYPLGICAERTAIQKAVSEGYKDFRAIAIASDMQDDFISPCGACRQVMREFGTN |
| LC_(G4S)3_ | WPVYMTKPDGTYIVMTVQELLPSSFGPEDLQKTQGGGGSGGGGSGGGGSDIQMT |
| HC | QSPSSLSASVGDRVTITCRASQSISSYLNWYQQKPGKAPKLLIYAASSLQSGVPSRFS |
| | GSGSGTDFTLTISSLQPEDFATYYCQQSYIAPYTFGGGTKVEIKGGGGSGGGGSGG |
| | GGSEVQLVESGGGLVQPGRSLRLSCTASGFTFSDHDMNWVRQAPGKGLEWVGRT |
| | RNAAGSYTTEYAASVKGRFTISRDDSKNSLYLQMNSLKTEDTAVYYCAREPKYWI |
| | DFDLWGRGTLVTSS (SEQ ID NO: 339) |
| CDA_(G4S)3 | MAQKRPACTLKPECVQQLLVCSQEAKKSAYCPYSHFPVGAALLTQEGRIFKGCNIE |
| linker_Ab69_ | NACYPLGICAERTAIQKAVSEGYKDFRAIAIASDMQDDFISPCGACRQVMREFGTN |
| LC_(G4S)3_ | WPVYMTKPDGTYIVMTVQELLPSSFGPEDLQKTQGGGGSGGGGSGGGGSEVQLV |
| HC | ESGGGLVQPGGSLRLSCAASGETFVDHDMDWVRQAPGKGLEWVGRTRNKLGSYT |
| | TEYAASVKGRETGRDDSKNSLYLQMNSLKTEDTAVYYCAREPKYWIDFDLWGRG |
| | TLVTVSSGGGGGGGGSGGGGSDIQMTQSPSSLSASVGDRVTITCRASQSISSYLN |
| | WYQQKPGKAPKLLIYAASSLQSGVPSRFSGSGSGTDFTLTISSLQPEDFATYYCQQS |
| | YIAPYIFGGGTKVEIK (SEQ ID NO: 340) |
| CDA_(G4S)4 | MAQKRPACTLKPECVQQLLVCSQEAKKSAYCPYSHFPVGAALLTQEGRIFKGCNIE |
| linker_Ab58_ | NACYPLGICAERTAIQKAVSEGYKDFRAIAIASDMQDDFISPCGACRQVMREFGTN |
| LC_(G4S)3_ | WPVYMTKPDGTYIVMTVQELLPSSFGPEDLQKTQGGGGSGGGGSGGGGSGGGGS |
| HC | DIQMTQSPSSVSASVGDRVTITCRASQGISSWLAWYQQKPGKAPKLLLIYAASSLQ |
| | SGVPSRFSGSGSGTDFTLTISSLQPEDFATYYCQQTNSFPYTFGGGTKVEIKGGGGS |
| | GGGGSGGGGSEVQLLESGGGLVQPGGSLRLSCAASGETFSNYAMSWVRQAPGKG |
| | LEWVSAISGSGGSTYYADSVKGRFTISRDNSKNTLYLQMNSLRAEDTAVYYCAKG |
| | PPTYHTNYYYMDVWGKGTTVTVSS (SEQ ID NO: 341) |
| CDA_(G4S)4 | MAQKRPACTLKPECVQQLLVCSQEAKKSAYCPYSHFPVGAALLTQEGRIFKGCNIE |
| linker_Ab61_ | NACYPLGICAERTAIQKAVSEGYKDFRAIAIASDMQDDFISPCGACRQVMREFGTN |
| LC_(G4S)3_ | WPVYMTKPDGTYIVMTVQELLPSSFGPEDLQKTQGGGGSGGGGSGGGGSGGGGS |
| HC | DIQMTQSPSSVSASVGDRVTITCRASQGISSWLAWYQQKPGKAPKLLIYAASSLQQ |
| | SGVPSRFSGSGSGTDFTLTISSLQPEDFATYYCQQTNSEPYTFGGGTKVEIKGGGGS |
| | GGGGSGGGGSEVQLLESGGGLVQPGGSLRLSCAASGETESSYVMIWVRQAPGKGL |
| | EWVSSISGDSVTTYYADSVKGRFTISRDNSKNTLYLQMNSLRAEDTAVYYCAKGP |
| | PTYHTNYYYMDVWGKGTTVTVSS (SEQ ID NO: 342) |
| CDA_(G4S)4 | MAQKRPACTLKPECVQQLLVCSQEAKKSAYCPYSHFPVGAALLTQEGRIFKGCNIE |
| linker_Ab66_ | NACYPLGICAERTAIQKAVSEGYKDFRAIAIASDMQDDFISPCGACRQVMREFGTN |
| LC_(G4S)3_ | WPVYMTKPDGTYIVMTVQELLPSSFGPEDLQKTQGGGGSGGGGSGGGGSGGGGS |
| HC | DIQMTQSPSSLSASVGDRVTITCRASQSISSYLNWYQQKPGKAPKLLIYAASSLQSG |
| | VPSRFSGSGSGTDFTLTISSLQPEDFATYYCQQSYIAPYTFGGGTKVEIKGGGGSGG |
| | GGSGGGGSEVQLVESGGGLVQPGGSLRLSCAASGETFSDHYMDWVRQAPGKGLA |
| | SGETFSDHYMDWVRQAPGKGLEWVGRIRNKASSYTTEYAASVKGRFTISRDDSKN |
| | SLYLQMNSLKTEDTAVYYCAREPKYWIDFDLWGRGTLVTVSS (SEQ ID NO: 343) |
| CDA_(G4S)4 | MAQKRPACTLKPECVQQLLVCSQEAKKSAYCPYSHFPVGAALLTQEGRIFKGCNIE |
| linker_Ab68_ | NACYPLGICAERTAIQKAVSEGYKDFRAIAIASDMQDDFISPCGACRQVMREFGTN |
| LC_(G4S)3_ | WPVYMTKPDGTYIVMTVQELLPSSFGPEDLQKTQGGGGSGGGGSGGGGSGGGGS |
| HC | DIQMTQSPSSLSASVGDRVTITCRASQSISSYLNWYQQKPGKAPKLLIYAASSLQSG |
| | VPSRFSGSGSGTDFTLTISSLQPEDFATYYCQQSYIAPYTFGGGTKVEIKGGGGSGG |
| | GGSGGGGSEVQLVESGGGLVQPGRSLRLSCTASGFTFSDHDMNWVRQAPGKGLE |
| | WVGRTRNAAGSYTTEYAASVKGRFTISRDDSKNSLYLQMNSLKTEDTAVYYCAR |
| | EPKYWIDFDLWGRGTLVTSS (SEQ ID NO: 344) |
| CDA_(G4S)4 | MAQKRPACTLKPECVQQLLVCSQEAKKSAYCPYSHFPVGAALLTQEGRIFKGCNIE |
| linker_Ab69_ | NACYPLGICAERTAIQKAVSEGYKDFRAIAIASDMQDDFISPCGACRQVMREFGTN |
| LC_(G4S)3_ | WPVYMTKPDGTYIVMTVQELLPSSFGPEDLQKTQGGGGSGGGGSGGGGSGGGGS |
| HC | EVQLVESGGGLVQPGGSLRLSCAASGETFVDHDMDWVRQAPGKGLEWVGRTRN |
| | KLGSYTTEYAASVKGRETGRDDSKNSLYLQMNSLKTEDTAVYYCAREPKYWIDF |
| | DLWGRGTLVTVSSGGGGSGGGGSGGGGSDIQMTQSPSSLSASVGDRVTITCRASQS |
| | ISSYLNWYQQKPGKAPKLLIYAASSLQSGVPSRFSGSGSGTDFTLTISSLQPEDFATY |
| | YCQQSYIAPYIFGGGTKVEIK (SEQ ID NO: 345) |
| CDA_(G4S)5 | MAQKRPACTLKPECVQQLLVCSQEAKKSAYCPYSHFPVGAALLTQEGRIFKGCNIE |
| linker_Ab58_ | NACYPLGICAERTAIQKAVSEGYKDFRAIAIASDMQDDFISPCGACRQVMREFGTN |
| LC_(G4S)3_ | WPVYMTKPDGTYIVMTVQELLPSSFGPEDLQKTQGGGGSGGGGSGGGGSGGGGS |
| HC | GGGGSDIQMTQSPSSVSASVGDRVTITCRASQGISSWLAWYQQKPGKAPKLLLIYA |
| | ASSLQSGVPSRFSGSGSGTDFTLTISSLQPEDFATYYCQQTNSFPYTFGGGTKVEIKG |
| | GGGSGGGGSGGGGSEVQLLESGGGLVQPGGSLRLSCAASGETFSNYAMSWVRQA |
| | PGKGLEWVSAISGSGGSTYYADSVKGRFTISRDNSKNTLYLQMNSLRAEDTAVYY |
| | CAKGPPTYHTNYYYMDVWGKGTTVTVSS (SEQ ID NO: 346) |
| CDA_(G4S)5 | MAQKRPACTLKPECVQQLLVCSQEAKKSAYCPYSHFPVGAALLTQEGRIFKGCNIE |
| linker_Ab61_ | NACYPLGICAERTAIQKAVSEGYKDFRAIAIASDMQDDFISPCGACRQVMREFGTN |
| LC_(G4S)3_ | WPVYMTKPDGTYIVMTVQELLPSSFGPEDLQKTQGGGGSGGGGSGGGGSGGGGS |
| HC | GGGGSDIQMTQSPSSVSASVGDRVTITCRASQGISSWLAWYQQKPGKAPKLLIYAA |
| | SSLQQSGVPSRFSGSGSGTDFTLTISSLQPEDFATYYCQQTNSEPYTFGGGTKVEIKG |
| | GGGSGGGGSGGGGSEVQLLESGGGLVQPGGSLRLSCAASGETESSYVMIWVRQAP |
| | GKGLEWVSSISGDSVTTYYADSVKGRFTISRDNSKNTLYLQMNSLRAEDTAVYYC |
| | AKGPPTYHTNYYYMDVWGKGTTVTVSS (SEQ ID NO: 347) |
| CDA_(G4S)5 | MAQKRPACTLKPECVQQLLVCSQEAKKSAYCPYSHFPVGAALLTQEGRIFKGCNIE |
| linker_Ab66_ | NACYPLGICAERTAIQKAVSEGYKDFRAIAIASDMQDDFISPCGACRQVMREFGTN |
| LC_(G4S)3_ | WPVYMTKPDGTYIVMTVQELLPSSFGPEDLQKTQGGGGSGGGGSGGGGSGGGGS |
| HC | GGGGSDIQMTQSPSSLSASVGDRVTITCRASQSISSYLNWYQQKPGKAPKLLIYAAS |
| | SLQSGVPSRFSGSGSGTDFTLTISSLQPEDFATYYCQQSYIAPYTFGGGTKVEIKGGG |
| | GSGGGGSGGGGSEVQLVESGGGLVQPGGSLRLSCAASGETFSDHYMDWVRQAPG |
| | KGLASGETFSDHYMDWVRQAPGKGLEWVGRIRNKASSYTTEYAASVKGRFTISRD |
| | DSKNSLYLQMNSLKTEDTAVYYCAREPKYWIDFDLWGRGTLVTVSS (SEQ ID NO: |
| | 348) |
| CDA_(G4S)5 | MAQKRPACTLKPECVQQLLVCSQEAKKSAYCPYSHFPVGAALLTQEGRIFKGCNIE |
| linker_Ab68_ | NACYPLGICAERTAIQKAVSEGYKDFRAIAIASDMQDDFISPCGACRQVMREFGTN |
| LC_(G4S)3_ | WPVYMTKPDGTYIVMTVQELLPSSFGPEDLQKTQGGGGSGGGGSGGGGSGGGGS |
| HC | GGGGSDIQMTQSPSSLSASVGDRVTITCRASQSISSYLNWYQQKPGKAPKLLIYAAS |
| | SLQSGVPSRFSGSGSGTDFTLTISSLQPEDFATYYCQQSYIAPYTFGGGTKVEIKGGG |
| | GSGGGGSGGGGSEVQLVESGGGLVQPGRSLRLSCTASGFTFSDHDMNWVRQAPG |
| | KGLEWVGRTRNAAGSYTTEYAASVKGRFTISRDDSKNSLYLQMNSLKTEDTAVY |
| | YCAREPKYWIDFDLWGRGTLVTSS (SEQ ID NO: 349) |
| CDA_(G4S)5 | MAQKRPACTLKPECVQQLLVCSQEAKKSAYCPYSHFPVGAALLTQEGRIFKGCNIE |
| linker_Ab69_ | NACYPLGICAERTAIQKAVSEGYKDFRAIAIASDMQDDFISPCGACRQVMREFGTN |
| LC_(G4S)3_ | WPVYMTKPDGTYIVMTVQELLPSSFGPEDLQKTQGGGGSGGGGSGGGGSGGGGS |
| HC | GGGGSEVQLVESGGGLVQPGGSLRLSCAASGETFVDHDMDWVRQAPGKGLEWV |
| | GRTRNKLGSYTTEYAASVKGRETGRDDSKNSLYLQMNSLKTEDTAVYYCAREPK |
| | YWIDFDLWGRGTLVTVSSGGGGSGGGGSGGGGSDIQMTQSPSSLSASVGDRVTIT |
| | CRASQSISSYLNWYQQKPGKAPKLLIYAASSLQSGVPSRFSGSGSGTDFTLTISSLQP |
| | EDFATYYCQQSYIAPYIFGGGTKVEIK (SEQ ID NO: 350) |
| CDA_(G4S)6 | MAQKRPACTLKPECVQQLLVCSQEAKKSAYCPYSHFPVGAALLTQEGRIFKGCNIE |
| linker_Ab58_ | NACYPLGICAERTAIQKAVSEGYKDFRAIAIASDMQDDFISPCGACRQVMREFGTN |
| LC_(G4S)3_ | WPVYMTKPDGTYIVMTVQELLPSSFGPEDLQKTQGGGGSGGGGSGGGGSGGGGS |
| HC | GGGGSGGGGSDIQMTQSPSSVSASVGDRVTITCRASQGISSWLAWYQQKPGKAPK |
| | LLLIYAASSLQSGVPSRFSGSGSGTDFTLTISSLQPEDFATYYCQQTNSFPYTFGGGT |
| | KVEIKGGGGSGGGGSGGGGSEVQLLESGGGLVQPGGSLRLSCAASGETFSNYAMS |
| | WVRQAPGKGLEWVSAISGSGGSTYYADSVKGRFTISRDNSKNTLYLQMNSLRAED |
| | TAVYYCAKGPPTYHTNYYYMDVWGKGTTVTVSS (SEQ ID NO: 351) |
| CDA_(G4S)6 | MAQKRPACTLKPECVQQLLVCSQEAKKSAYCPYSHFPVGAALLTQEGRIFKGCNIE |
| linker_Ab61_ | NACYPLGICAERTAIQKAVSEGYKDFRAIAIASDMQDDFISPCGACRQVMREFGTN |
| LC_(G4S)3_ | WPVYMTKPDGTYIVMTVQELLPSSFGPEDLQKTQGGGGSGGGGSGGGGSGGGGS |
| HC | GGGGSGGGGSDIQMTQSPSSVSASVGDRVTITCRASQGISSWLAWYQQKPGKAPK |
| | LLIYAASSLQQSGVPSRFSGSGSGTDFTLTISSLQPEDFATYYCQQTNSEPYTFGGGT |
| | KVEIKGGGGSGGGGGGGGSEVQLLESGGGLVQPGGSLRLSCAASGETESSYVMI |
| | WVRQAPGKGLEWVSSISGDSVTTYYADSVKGRFTISRDNSKNTLYLQMNSLRAED |
| | TAVYYCAKGPPTYHTNYYYMDVWGKGTTVTVSS (SEQ ID NO: 352) |
| CDA_(G4S)6 | MAQKRPACTLKPECVQQLLVCSQEAKKSAYCPYSHFPVGAALLTQEGRIFKGCNIE |
| linker_Ab66_ | NACYPLGICAERTAIQKAVSEGYKDFRAIAIASDMQDDFISPCGACRQVMREFGTN |
| LC_(G4S)3_ | WPVYMTKPDGTYIVMTVQELLPSSFGPEDLQKTQGGGGSGGGGSGGGGSGGGGS |
| HC | GGGGSGGGGSDIQMTQSPSSLSASVGDRVTITCRASQSISSYLNWYQQKPGKAPKL |
| | LIYAASSLQSGVPSRFSGSGSGTDFTLTISSLQPEDFATYYCQQSYIAPYTFGGGTKV |
| | EIKGGGGSGGGGSGGGGSEVQLVESGGGLVQPGGSLRLSCAASGETFSDHYMDW |
| | VRQAPGKGLASGETFSDHYMDWVRQAPGKGLEWVGRIRNKASSYTTEYAASVKG |
| | RFTISRDDSKNSLYLQMNSLKTEDTAVYYCAREPKYWIDFDLWGRGTLVTVSS |
| | (SEQ ID NO: 353) |
| CDA_(G4S)6 | MAQKRPACTLKPECVQQLLVCSQEAKKSAYCPYSHFPVGAALLTQEGRIFKGCNIE |
| linker_Ab68_ | NACYPLGICAERTAIQKAVSEGYKDFRAIAIASDMQDDFISPCGACRQVMREFGTN |
| LC_(G4S)3_ | WPVYMTKPDGTYIVMTVQELLPSSFGPEDLQKTQGGGGSGGGGSGGGGSGGGGS |
| HC | GGGGSGGGGSDIQMTQSPSSLSASVGDRVTITCRASQSISSYLNWYQQKPGKAPKL |
| | LIYAASSLQSGVPSRFSGSGSGTDFTLTISSLQPEDFATYYCQQSYIAPYTFGGGTKV |
| | EIKGGGGSGGGGGGGGSEVQLVESGGGLVQPGRSLRLSCTASGFTFSDHDMNWV |
| | RQAPGKGLEWVGRTRNAAGSYTTEYAASVKGRFTISRDDSKNSLYLQMNSLKTED |
| | TAVYYCAREPKYWIDFDLWGRGTLVTSS (SEQ ID NO: 354) |
| CDA_(G4S)6 | MAQKRPACTLKPECVQQLLVCSQEAKKSAYCPYSHFPVGAALLTQEGRIFKGCNIE |
| linker_Ab69_ | NACYPLGICAERTAIQKAVSEGYKDFRAIAIASDMQDDFISPCGACRQVMREFGTN |
| LC_(G4S)3_ | WPVYMTKPDGTYIVMTVQELLPSSFGPEDLQKTQGGGGSGGGGSGGGGSGGGGS |
| HC | GGGGGGGGSEVQLVESGGGLVQPGGSLRLSCAASGETFVDHDMDWVRQAPGK |
| | GLEWVGRTRNKLGSYTTEYAASVKGRETGRDDSKNSLYLQMNSLKTEDTAVYYC |
| | AREPKYWIDFDLWGRGTLVTVSSGGGGSGGGGSGGGGSDIQMTQSPSSLSASVGD |
| | RVTITCRASQSISSYLNWYQQKPGKAPKLLIYAASSLQSGVPSRFSGSGSGTDFTLTI |
| | SSLQPEDFATYYCQQSYIAPYIFGGGTKVEIK (SEQ ID NO: 355) |
| CDA_(G4S)7 | MAQKRPACTLKPECVQQLLVCSQEAKKSAYCPYSHFPVGAALLTQEGRIFKGCNIE |
| linker_Ab58_ | NACYPLGICAERTAIQKAVSEGYKDFRAIAIASDMQDDFISPCGACRQVMREFGTN |
| LC_(G4S)3_ | WPVYMTKPDGTYIVMTVQELLPSSFGPEDLQKTQGGGGSGGGGSGGGGSGGGGS |
| HC | GGGGSGGGGSGGGGSDIQMTQSPSSVSASVGDRVTITCRASQGISSWLAWYQQKP |
| | GKAPKLLLIYAASSLQSGVPSRFSGSGSGTDFTLTISSLQPEDFATYYCQQTNSFPYT |
| | FGGGTKVEIKGGGGSGGGGSGGGGSEVQLLESGGGLVQPGGSLRLSCAASGETFS |
| | NYAMSWVRQAPGKGLEWVSAISGSGGSTYYADSVKGRFTISRDNSKNTLYLQMN |
| | SLRAEDTAVYYCAKGPPTYHTNYYYMDVWGKGTTVTVSS (SEQ ID NO: 356) |
| CDA_(G4S)7 | MAQKRPACTLKPECVQQLLVCSQEAKKSAYCPYSHFPVGAALLTQEGRIFKGCNIE |
| linker_Ab61_ | NACYPLGICAERTAIQKAVSEGYKDFRAIAIASDMQDDFISPCGACRQVMREFGTN |
| LC_(G4S)3_ | WPVYMTKPDGTYIVMTVQELLPSSFGPEDLQKTQGGGGSGGGGSGGGGSGGGGS |
| HC | GGGGSGGGGSGGGGSDIQMTQSPSSVSASVGDRVTITCRASQGISSWLAWYQQKP |
| | GKAPKLLIYAASSLQQSGVPSRFSGSGSGTDFTLTISSLQPEDFATYYCQQTNSEPYT |
| | FGGGTKVEIKGGGGSGGGGSGGGGSEVQLLESGGGLVQPGGSLRLSCAASGETESS |
| | YVMIWVRQAPGKGLEWVSSISGDSVTTYYADSVKGRFTISRDNSKNTLYLQMNSL |
| | RAEDTAVYYCAKGPPTYHTNYYYMDVWGKGTTVTVSS (SEQ ID NO: 357) |
| CDA_(G4S)7 | MAQKRPACTLKPECVQQLLVCSQEAKKSAYCPYSHFPVGAALLTQEGRIFKGCNIE |
| linker_Ab66_ | NACYPLGICAERTAIQKAVSEGYKDFRAIAIASDMQDDFISPCGACRQVMREFGTN |
| LC_(G4S)3_ | WPVYMTKPDGTYIVMTVQELLPSSFGPEDLQKTQGGGGSGGGGSGGGGSGGGGS |
| HC | GGGGSGGGGSGGGGSDIQMTQSPSSLSASVGDRVTITCRASQSISSYLNWYQQKPG |
| | KAPKLLIYAASSLQSGVPSRFSGSGSGTDFTLTISSLQPEDFATYYCQQSYIAPYTFG |
| | GGTKVEIKGGGGSGGGGSGGGGSEVQLVESGGGLVQPGGSLRLSCAASGETFSDH |
| | YMDWVRQAPGKGLASGETFSDHYMDWVRQAPGKGLEWVGRIRNKASSYTTEYA |
| | ASVKGRFTISRDDSKNSLYLQMNSLKTEDTAVYYCAREPKYWIDFDLWGRGTLVT |
| | VSS (SEQ ID NO: 358) |
| CDA_(G4S)7 | MAQKRPACTLKPECVQQLLVCSQEAKKSAYCPYSHFPVGAALLTQEGRIFKGCNIE |
| linker_Ab68_ | NACYPLGICAERTAIQKAVSEGYKDFRAIAIASDMQDDFISPCGACRQVMREFGTN |
| LC_(G4S)3_ | WPVYMTKPDGTYIVMTVQELLPSSFGPEDLQKTQGGGGSGGGGSGGGGSGGGGS |
| HC | GGGGSGGGGSGGGGSDIQMTQSPSSLSASVGDRVTITCRASQSISSYLNWYQQKPG |
| | KAPKLLIYAASSLQSGVPSRFSGSGSGTDFTLTISSLQPEDFATYYCQQSYIAPYTFG |
| | GGTKVEIKGGGGSGGGGSGGGGSEVQLVESGGGLVQPGRSLRLSCTASGFTFSDH |
| | DMNWVRQAPGKGLEWVGRTRNAAGSYTTEYAASVKGRFTISRDDSKNSLYLQM |
| | NSLKTEDTAVYYCAREPKYWIDFDLWGRGTLVTSS (SEQ ID NO: 359) |
| CDA_(G4S)7 | MAQKRPACTLKPECVQQLLVCSQEAKKSAYCPYSHFPVGAALLTQEGRIFKGCNIE |
| linker_Ab69_ | NACYPLGICAERTAIQKAVSEGYKDFRAIAIASDMQDDFISPCGACRQVMREFGTN |
| LC_(G4S)3_ | WPVYMTKPDGTYIVMTVQELLPSSFGPEDLQKTQGGGGSGGGGSGGGGSGGGGS |
| HC | GGGGSGGGGSGGGGSEVQLVESGGGLVQPGGSLRLSCAASGETFVDHDMDWVR |
| | QAPGKGLEWVGRTRNKLGSYTTEYAASVKGRETGRDDSKNSLYLQMNSLKTEDT |
| | AVYYCAREPKYWIDFDLWGRGTLVTVSSGGGGSGGGGSGGGGSDIQMTQSPSSLS |
| | ASVGDRVTITCRASQSISSYLNWYQQKPGKAPKLLIYAASSLQSGVPSRFSGSGSGT |
| | DFTLTISSLQPEDFATYYCQQSYIAPYIFGGGTKVEIK (SEQ ID NO: 360) |
| CDA_(G4S)8 | MAQKRPACTLKPECVQQLLVCSQEAKKSAYCPYSHFPVGAALLTQEGRIFKGCNIE |
| linker_Ab58_ | NACYPLGICAERTAIQKAVSEGYKDFRAIAIASDMQDDFISPCGACRQVMREFGTN |
| LC_(G4S)3_ | WPVYMTKPDGTYIVMTVQELLPSSFGPEDLQKTQGGGGSGGGGSGGGGSGGGGS |
| HC | GGGGSGGGGSGGGGSGGGGSDIQMTQSPSSVSASVGDRVTITCRASQGISSWLAW |
| | YQQKPGKAPKLLLIYAASSLQSGVPSRFSGSGSGTDFTLTISSLQPEDFATYYCQQT |
| | NSFPYTFGGGTKVEIKGGGGSGGGGSGGGGSEVQLLESGGGLVQPGGSLRLSCAA |
| | SGETFSNYAMSWVRQAPGKGLEWVSAISGSGGSTYYADSVKGRFTISRDNSKNTL |
| | YLQMNSLRAEDTAVYYCAKGPPTYHTNYYYMDVWGKGTTVTVSS (SEQ ID NO: |
| | 361) |
| CDA_(G4S)8 | MAQKRPACTLKPECVQQLLVCSQEAKKSAYCPYSHFPVGAALLTQEGRIFKGCNIE |
| linker_Ab61_ | NACYPLGICAERTAIQKAVSEGYKDFRAIAIASDMQDDFISPCGACRQVMREFGTN |
| LC_(G4S)3_ | WPVYMTKPDGTYIVMTVQELLPSSFGPEDLQKTQGGGGSGGGGSGGGGSGGGGS |
| HC | GGGGSGGGGSGGGGSGGGGSDIQMTQSPSSVSASVGDRVTITCRASQGISSWLAW |
| | YQQKPGKAPKLLIYAASSLQQSGVPSRFSGSGSGTDFTLTISSLQPEDFATYYCQQT |
| | NSEPYTFGGGTKVEIKGGGGSGGGGSGGGGSEVQLLESGGGLVQPGGSLRLSCAA |
| | SGETESSYVMIWVRQAPGKGLEWVSSISGDSVTTYYADSVKGRFTISRDNSKNTLY |
| | LQMNSLRAEDTAVYYCAKGPPTYHTNYYYMDVWGKGTTVTVSS (SEQ ID NO: |
| | 362) |
| CDA_(G4S)8 | MAQKRPACTLKPECVQQLLVCSQEAKKSAYCPYSHFPVGAALLTQEGRIFKGCNIE |
| linker_Ab66_ | NACYPLGICAERTAIQKAVSEGYKDFRAIAIASDMQDDFISPCGACRQVMREFGTN |
| LC_(G4S)3_ | WPVYMTKPDGTYIVMTVQELLPSSFGPEDLQKTQGGGGSGGGGSGGGGSGGGGS |
| HC | GGGGSGGGGSGGGGSGGGGSDIQMTQSPSSLSASVGDRVTITCRASQSISSYLNWY |
| | QQKPGKAPKLLIYAASSLQSGVPSRFSGSGSGTDFTLTISSLQPEDFATYYCQQSYIA |
| | PYTFGGGTKVEIKGGGGSGGGGSGGGGSEVQLVESGGGLVQPGGSLRLSCAASGE |
| | TFSDHYMDWVRQAPGKGLASGETFSDHYMDWVRQAPGKGLEWVGRIRNKASSY |
| | TTEYAASVKGRFTISRDDSKNSLYLQMNSLKTEDTAVYYCAREPKYWIDFDLWGR |
| | GTLVTVSS (SEQ ID NO: 363) |
| CDA_(G4S)8 | MAQKRPACTLKPECVQQLLVCSQEAKKSAYCPYSHFPVGAALLTQEGRIFKGCNIE |
| linker_Ab68_ | NACYPLGICAERTAIQKAVSEGYKDFRAIAIASDMQDDFISPCGACRQVMREFGTN |
| LC_(G4S)3_ | WPVYMTKPDGTYIVMTVQELLPSSFGPEDLQKTQGGGGSGGGGSGGGGSGGGGS |
| HC | GGGGSGGGGSGGGGSGGGGSDIQMTQSPSSLSASVGDRVTITCRASQSISSYLNWY |
| | QQKPGKAPKLLIYAASSLQSGVPSRFSGSGSGTDFTLTISSLQPEDFATYYCQQSYIA |
| | PYTFGGGTKVEIKGGGGSGGGGSGGGGSEVQLVESGGGLVQPGRSLRLSCTASGF |
| | TFSDHDMNWVRQAPGKGLEWVGRTRNAAGSYTTEYAASVKGRFTISRDDSKNSL |
| | YLQMNSLKTEDTAVYYCAREPKYWIDFDLWGRGTLVTSS (SEQ ID NO: 364) |
| CDA_(G4S)8 | MAQKRPACTLKPECVQQLLVCSQEAKKSAYCPYSHFPVGAALLTQEGRIFKGCNIE |
| linker_Ab69_ | NACYPLGICAERTAIQKAVSEGYKDFRAIAIASDMQDDFISPCGACRQVMREFGTN |
| LC_(G4S)3_ | WPVYMTKPDGTYIVMTVQELLPSSFGPEDLQKTQGGGGSGGGGSGGGGSGGGGS |
| HC | GGGGSGGGGSGGGGSGGGGSEVQLVESGGGLVQPGGSLRLSCAASGETFVDHDM |
| | DWVRQAPGKGLEWVGRTRNKLGSYTTEYAASVKGRETGRDDSKNSLYLQMNSL |
| | KTEDTAVYYCAREPKYWIDFDLWGRGTLVTVSSGGGGSGGGGSGGGGSDIQMTQ |
| | SPSSLSASVGDRVTITCRASQSISSYLNWYQQKPGKAPKLLIYAASSLQSGVPSRFSG |
| | SGSGTDFTLTISSLQPEDFATYYCQQSYIAPYIFGGGTKVEIK (SEQ ID NO: 365) |
| CDA_(G4S)9 | MAQKRPACTLKPECVQQLLVCSQEAKKSAYCPYSHFPVGAALLTQEGRIFKGCNIE |
| linker_Ab58_ | NACYPLGICAERTAIQKAVSEGYKDFRAIAIASDMQDDFISPCGACRQVMREFGTN |
| LC_(G4S)3_ | WPVYMTKPDGTYIVMTVQELLPSSFGPEDLQKTQGGGGSGGGGSGGGGSGGGGS |
| HC | GGGGSGGGGSGGGGSGGGGSGGGGSDIQMTQSPSSVSASVGDRVTITCRASQGISS |
| | WLAWYQQKPGKAPKLLLIYAASSLQSGVPSRFSGSGSGTDFTLTISSLQPEDFATYY |
| | CQQTNSFPYTFGGGTKVEIKGGGGSGGGGSGGGGSEVQLLESGGGLVQPGGSLRL |
| | SCAASGETFSNYAMSWVRQAPGKGLEWVSAISGSGGSTYYADSVKGRFTISRDNS |
| | KNTLYLQMNSLRAEDTAVYYCAKGPPTYHTNYYYMDVWGKGTTVTVSS (SEQ ID |
| | NO: 366) |
| CDA_(G4S)9 | MAQKRPACTLKPECVQQLLVCSQEAKKSAYCPYSHFPVGAALLTQEGRIFKGCNIE |
| linker_Ab61_ | NACYPLGICAERTAIQKAVSEGYKDFRAIAIASDMQDDFISPCGACRQVMREFGTN |
| LC_(G4S)3_ | WPVYMTKPDGTYIVMTVQELLPSSFGPEDLQKTQGGGGSGGGGSGGGGSGGGGS |
| HC | GGGGSGGGGSGGGGSGGGGSGGGGSDIQMTQSPSSVSASVGDRVTITCRASQGISS |
| | WLAWYQQKPGKAPKLLIYAASSLQQSGVPSRFSGSGSGTDFTLTISSLQPEDFATY |
| | YCQQTNSEPYTFGGGTKVEIKGGGGSGGGGSGGGGSEVQLLESGGGLVQPGGSLR |
| | LSCAASGETESSYVMIWVRQAPGKGLEWVSSISGDSVTTYYADSVKGRFTISRDNS |
| | KNTLYLQMNSLRAEDTAVYYCAKGPPTYHTNYYYMDVWGKGTTVTVSS (SEQ ID |
| | NO: 367) |
| CDA_(G4S)9 | MAQKRPACTLKPECVQQLLVCSQEAKKSAYCPYSHFPVGAALLTQEGRIFKGCNIE |
| linker_Ab66_ | NACYPLGICAERTAIQKAVSEGYKDFRAIAIASDMQDDFISPCGACRQVMREFGTN |
| LC_(G4S)3_ | WPVYMTKPDGTYIVMTVQELLPSSFGPEDLQKTQGGGGSGGGGSGGGGSGGGGS |
| HC | GGGGSGGGGSGGGGSGGGGSGGGGSDIQMTQSPSSLSASVGDRVTITCRASQSISS |
| | YLNWYQQKPGKAPKLLIYAASSLQSGVPSRFSGSGSGTDFTLTISSLQPEDFATYYC |
| | QQSYIAPYTFGGGTKVEIKGGGGSGGGGSGGGGSEVQLVESGGGLVQPGGSLRLS |
| | CAASGETFSDHYMDWVRQAPGKGLASGETFSDHYMDWVRQAPGKGLEWVGRIR |
| | NKASSYTTEYAASVKGRFTISRDDSKNSLYLQMNSLKTEDTAVYYCAREPKYWID |
| | FDLWGRGTLVTVSS (SEQ ID NO: 368) |
| CDA_(G4S)9 | MAQKRPACTLKPECVQQLLVCSQEAKKSAYCPYSHFPVGAALLTQEGRIFKGCNIE |
| linker_Ab68_ | NACYPLGICAERTAIQKAVSEGYKDFRAIAIASDMQDDFISPCGACRQVMREFGTN |
| LC_(G4S)3_ | WPVYMTKPDGTYIVMTVQELLPSSFGPEDLQKTQGGGGSGGGGSGGGGSGGGGS |
| HC | GGGGSGGGGSGGGGSGGGGSGGGGSDIQMTQSPSSLSASVGDRVTITCRASQSISS |
| | YLNWYQQKPGKAPKLLIYAASSLQSGVPSRFSGSGSGTDFTLTISSLQPEDFATYYC |
| | QQSYIAPYTFGGGTKVEIKGGGGSGGGGSGGGGSEVQLVESGGGLVQPGRSLRLS |
| | CTASGFTFSDHDMNWVRQAPGKGLEWVGRTRNAAGSYTTEYAASVKGRFTISRD |
| | DSKNSLYLQMNSLKTEDTAVYYCAREPKYWIDFDLWGRGTLVTSS (SEQ ID NO: |
| | 369) |
| CDA_(G4S)9 | MAQKRPACTLKPECVQQLLVCSQEAKKSAYCPYSHFPVGAALLTQEGRIFKGCNIE |
| linker_Ab69_ | NACYPLGICAERTAIQKAVSEGYKDFRAIAIASDMQDDFISPCGACRQVMREFGTN |
| LC_(G4S)3_ | WPVYMTKPDGTYIVMTVQELLPSSFGPEDLQKTQGGGGSGGGGSGGGGSGGGGS |
| HC | GGGGSGGGGSGGGGSGGGGSGGGGSEVQLVESGGGLVQPGGSLRLSCAASGETF |
| | VDHDMDWVRQAPGKGLEWVGRTRNKLGSYTTEYAASVKGRETGRDDSKNSLYL |
| | QMNSLKTEDTAVYYCAREPKYWIDFDLWGRGTLVTVSSGGGGSGGGGSGGGGSD |
| | IQMTQSPSSLSASVGDRVTITCRASQSISSYLNWYQQKPGKAPKLLIYAASSLQSGV |
| | PSRFSGSGSGTDFTLTISSLQPEDFATYYCQQSYIAPYIFGGGTKVEIK (SEQ ID NO: |
| | 370) |
| CDA_(G4S)10 | MAQKRPACTLKPECVQQLLVCSQEAKKSAYCPYSHFPVGAALLTQEGRIFKGCNIE |
| linker_Ab58_ | NACYPLGICAERTAIQKAVSEGYKDFRAIAIASDMQDDFISPCGACRQVMREFGTN |
| LC_(G4S)3_ | WPVYMTKPDGTYIVMTVQELLPSSFGPEDLQKTQGGGGSGGGGSGGGGSGGGGS |
| HC | GGGGSGGGGSGGGGSGGGGSGGGGSGGGGSDIQMTQSPSSVSASVGDRVTITCRA |
| | SQGISSWLAWYQQKPGKAPKLLLIYAASSLQSGVPSRFSGSGSGTDFTLTISSLQPE |
| | DFATYYCQQTNSFPYTFGGGTKVEIKGGGGSGGGGSGGGGSEVQLLESGGGLVQP |
| | GGSLRLSCAASGETFSNYAMSWVRQAPGKGLEWVSAISGSGGSTYYADSVKGRFT |
| | ISRDNSKNTLYLQMNSLRAEDTAVYYCAKGPPTYHTNYYYMDVWGKGTTVTVSS |
| | (SEQ ID NO: 371) |
| CDA_(G4S)10 | MAQKRPACTLKPECVQQLLVCSQEAKKSAYCPYSHFPVGAALLTQEGRIFKGCNIE |
| linker_Ab61_ | NACYPLGICAERTAIQKAVSEGYKDFRAIAIASDMQDDFISPCGACRQVMREFGTN |
| LC_(G4S)3_ | WPVYMTKPDGTYIVMTVQELLPSSFGPEDLQKTQGGGGSGGGGSGGGGSGGGGS |
| HC | GGGGSGGGGSGGGGSGGGGSGGGGSGGGGSDIQMTQSPSSVSASVGDRVTITCRA |
| | SQGISSWLAWYQQKPGKAPKLLIYAASSLQQSGVPSRFSGSGSGTDFTLTISSLQPE |
| | DFATYYCQQTNSEPYTFGGGTKVEIKGGGGSGGGGSGGGGSEVQLLESGGGLVQP |
| | GGSLRLSCAASGETESSYVMIWVRQAPGKGLEWVSSISGDSVTTYYADSVKGRFTI |
| | SRDNSKNTLYLQMNSLRAEDTAVYYCAKGPPTYHTNYYYMDVWGKGTTVTVSS |
| | (SEQ ID NO: 372) |
| CDA_(G4S)10 | MAQKRPACTLKPECVQQLLVCSQEAKKSAYCPYSHFPVGAALLTQEGRIFKGCNIE |
| linker_Ab66_ | NACYPLGICAERTAIQKAVSEGYKDFRAIAIASDMQDDFISPCGACRQVMREFGTN |
| LC_(G4S)3_ | WPVYMTKPDGTYIVMTVQELLPSSFGPEDLQKTQGGGGSGGGGSGGGGSGGGGS |
| HC | GGGGSGGGGSGGGGSGGGGSGGGGSGGGGSDIQMTQSPSSLSASVGDRVTITCRA |
| | SQSISSYLNWYQQKPGKAPKLLIYAASSLQSGVPSRFSGSGSGTDFTLTISSLQPEDF |
| | ATYYCQQSYIAPYTFGGGTKVEIKGGGGSGGGGSGGGGSEVQLVESGGGLVQPGG |
| | SLRLSCAASGETFSDHYMDWVRQAPGKGLASGETFSDHYMDWVRQAPGKGLEW |
| | VGRIRNKASSYTTEYAASVKGRFTISRDDSKNSLYLQMNSLKTEDTAVYYCAREPK |
| | YWIDFDLWGRGTLVTVSS (SEQ ID NO: 373) |
| CDA_(G4S)10 | MAQKRPACTLKPECVQQLLVCSQEAKKSAYCPYSHFPVGAALLTQEGRIFKGCNIE |
| linker_Ab68_ | NACYPLGICAERTAIQKAVSEGYKDFRAIAIASDMQDDFISPCGACRQVMREFGTN |
| LC_(G4S)3_ | WPVYMTKPDGTYIVMTVQELLPSSFGPEDLQKTQGGGGSGGGGSGGGGSGGGGS |
| HC | GGGGSGGGGGGGGSGGGGSGGGGSGGGGSDIQMTQSPSSLSASVGDRVTITCRA |
| | SQSISSYLNWYQQKPGKAPKLLIYAASSLQSGVPSRFSGSGSGTDFTLTISSLQPEDF |
| | ATYYCQQSYIAPYTFGGGTKVEIKGGGGSGGGGSGGGGSEVQLVESGGGLVQPGR |
| | SLRLSCTASGFTFSDHDMNWVRQAPGKGLEWVGRTRNAAGSYTTEYAASVKGRF |
| | TISRDDSKNSLYLQMNSLKTEDTAVYYCAREPKYWIDFDLWGRGTL VTSS (SEQ ID |
| | NO: 374) |
| CDA_(G4S)10 | MAQKRPACTLKPECVQQLLVCSQEAKKSAYCPYSHFPVGAALLTQEGRIFKGCNIE |
| linker_Ab69_ | NACYPLGICAERTAIQKAVSEGYKDFRAIAIASDMQDDFISPCGACRQVMREFGTN |
| LC_(G4S)3_ | WPVYMTKPDGTYIVMTVQELLPSSFGPEDLQKTQGGGGSGGGGSGGGGSGGGGS |
| HC | GGGGSGGGGSGGGGSGGGGSGGGGSGGGGSEVQLVESGGGLVQPGGSLRLSCAA |
| | SGETFVDHDMDWVRQAPGKGLEWVGRTRNKLGSYTTEYAASVKGRETGRDDSK |
| | NSLYLQMNSLKTEDTAVYYCAREPKYWIDFDLWGRGTLVTVSSGGGGSGGGGSG |
| | GGGSDIQMTQSPSSLSASVGDRVTITCRASQSISSYLNWYQQKPGKAPKLLIYAASS |
| | LQSGVPSRFSGSGSGTDFTLTISSLQPEDFATYYCQQSYIAPYIFGGGTKVEIK (SEQ |
| | ID NO: 375) |
| CDA_(G4S)11 | MAQKRPACTLKPECVQQLLVCSQEAKKSAYCPYSHFPVGAALLTQEGRIFKGCNIE |
| linker_Ab58_ | NACYPLGICAERTAIQKAVSEGYKDFRAIAIASDMQDDFISPCGACRQVMREFGTN |
| LC_(G4S)3_ | WPVYMTKPDGTYIVMTVQELLPSSFGPEDLQKTQGGGGSGGGGSGGGGSGGGGS |
| HC | GGGGSGGGGSGGGGSGGGGSGGGGSGGGGSGGGGSDIQMTQSPSSVSASVGDRV |
| | TITCRASQGISSWLAWYQQKPGKAPKLLLIYAASSLQSGVPSRFSGSGSGTDFTLTIS |
| | SLQPEDFATYYCQQTNSFPYTFGGGTKVEIKGGGGSGGGGSGGGGSEVQLLESGG |
| | GLVQPGGSLRLSCAASGETFSNYAMSWVRQAPGKGLEWVSAISGSGGSTYYADSV |
| | KGRFTISRDNSKNTLYLQMNSLRAEDTAVYYCAKGPPTYHTNYYYMDVWGKGTT |
| | VTVSS (SEQ ID NO: 376) |
| CDA_(G4S)11 | MAQKRPACTLKPECVQQLLVCSQEAKKSAYCPYSHFPVGAALLTQEGRIFKGCNIE |
| linker_Ab61_ | NACYPLGICAERTAIQKAVSEGYKDFRAIAIASDMQDDFISPCGACRQVMREFGTN |
| LC_(G4S)3_ | WPVYMTKPDGTYIVMTVQELLPSSFGPEDLQKTQGGGGSGGGGSGGGGSGGGGS |
| HC | GGGGSGGGGSGGGGSGGGGSGGGGSGGGGSGGGGSDIQMTQSPSSVSASVGDRV |
| | TITCRASQGISSWLAWYQQKPGKAPKLLIYAASSLQQSGVPSRFSGSGSGTDFTLTI |
| | SSLQPEDFATYYCQQTNSEPYTFGGGTKVEIKGGGGSGGGGSGGGGSEVQLLESG |
| | GGLVQPGGSLRLSCAASGETESSYVMIWVRQAPGKGLEWVSSISGDSVTTYYADS |
| | VKGRFTISRDNSKNTLYLQMNSLRAEDTAVYYCAKGPPTYHTNYYYMDVWGKG |
| | TTVTVSS (SEQ ID NO: 377) |
| CDA_(G4S)11 | MAQKRPACTLKPECVQQLLVCSQEAKKSAYCPYSHFPVGAALLTQEGRIFKGCNIE |
| linker_Ab66_ | NACYPLGICAERTAIQKAVSEGYKDFRAIAIASDMQDDFISPCGACRQVMREFGTN |
| LC_(G4S)3_ | WPVYMTKPDGTYIVMTVQELLPSSFGPEDLQKTQGGGGSGGGGSGGGGSGGGGS |
| HC | GGGGGGGGSGGGGSGGGGSGGGGSGGGGSGGGGSDIQMTQSPSSLSASVGDRV |
| | TITCRASQSISSYLNWYQQKPGKAPKLLIYAASSLQSGVPSRFSGSGSGTDFTLTISS |
| | LQPEDFATYYCQQSYIAPYTFGGGTKVEIKGGGGSGGGGSGGGGSEVQLVESGGG |
| | LVQPGGSLRLSCAASGETFSDHYMDWVRQAPGKGLASGETFSDHYMDWVRQAP |
| | GKGLEWVGRIRNKASSYTTEYAASVKGRFTISRDDSKNSLYLQMNSLKTEDTAVY |
| | YCAREPKYWIDFDLWGRGTLVTVSS (SEQ ID NO: 378) |
| CDA_(G4S)11 | MAQKRPACTLKPECVQQLLVCSQEAKKSAYCPYSHFPVGAALLTQEGRIFKGCNIE |
| linker_Ab68_ | NACYPLGICAERTAIQKAVSEGYKDFRAIAIASDMQDDFISPCGACRQVMREFGTN |
| LC_(G4S)3_ | WPVYMTKPDGTYIVMTVQELLPSSFGPEDLQKTQGGGGSGGGGSGGGGSGGGGS |
| HC | GGGGSGGGGSGGGGSGGGGSGGGGSGGGGSGGGGSDIQMTQSPSSLSASVGDRV |
| | TITCRASQSISSYLNWYQQKPGKAPKLLIYAASSLQSGVPSRFSGSGSGTDFTLTISS |
| | LQPEDFATYYCQQSYIAPYTFGGGTKVEIKGGGGSGGGGSGGGGSEVQLVESGGG |
| | LVQPGRSLRLSCTASGFTFSDHDMNWVRQAPGKGLEWVGRTRNAAGSYTTEYAA |
| | SVKGRFTISRDDSKNSLYLQMNSLKTEDTAVYYCAREPKYWIDFDLWGRGTLVTS |
| | S (SEQ ID NO: 379) |
| CDA_(G4S)11 | MAQKRPACTLKPECVQQLLVCSQEAKKSAYCPYSHFPVGAALLTQEGRIFKGCNIE |
| linker_Ab69_ | NACYPLGICAERTAIQKAVSEGYKDFRAIAIASDMQDDFISPCGACRQVMREFGTN |
| LC_(G4S)3_ | WPVYMTKPDGTYIVMTVQELLPSSFGPEDLQKTQGGGGSGGGGSGGGGSGGGGS |
| HC | GGGGSGGGGSGGGGSGGGGGGGGSGGGGSGGGGSEVQLVESGGGLVQPGGSLR |
| | LSCAASGETFVDHDMDWVRQAPGKGLEWVGRTRNKLGSYTTEYAASVKGRETG |
| | RDDSKNSLYLQMNSLKTEDTAVYYCAREPKYWIDFDLWGRGTLVTVSSGGGGSG |
| | GGGSGGGGSDIQMTQSPSSLSASVGDRVTITCRASQSISSYLNWYQQKPGKAPKLLI |
| | YAASSLQSGVPSRFSGSGSGTDFTLTISSLQPEDFATYYCQQSYIAPYIFGGGTKVEI |
| | K (SEQ ID NO: 380) |
| CDA_(G4S)112 | MAQKRPACTLKPECVQQLLVCSQEAKKSAYCPYSHFPVGAALLTQEGRIFKGCNIE |
| linker_Ab58_ | NACYPLGICAERTAIQKAVSEGYKDFRAIAIASDMQDDFISPCGACRQVMREFGTN |
| LC_(G4S)3_ | WPVYMTKPDGTYIVMTVQELLPSSFGPEDLQKTQGGGGSGGGGSGGGGSGGGGS |
| HC | GGGGSGGGGSGGGGSGGGGSGGGGSGGGGSGGGGSGGGGSDIQMTQSPSSVSAS |
| | VGDRVTITCRASQGISSWLAWYQQKPGKAPKLLLIYAASSLQSGVPSRFSGSGSGT |
| | DFTLTISSLQPEDFATYYCQQTNSFPYTFGGGTKVEIKGGGGSGGGGSGGGGSEVQ |
| | LLESGGGLVQPGGSLRLSCAASGETFSNYAMSWVRQAPGKGLEWVSAISGSGGST |
| | YYADSVKGRFTISRDNSKNTLYLQMNSLRAEDTAVYYCAKGPPTYHTNYYYMDV |
| | WGKGTTVTVSS (SEQ ID NO: 381) |
| CDA_(G4S)112 | MAQKRPACTLKPECVQQLLVCSQEAKKSAYCPYSHFPVGAALLTQEGRIFKGCNIE |
| linker_Ab61_ | NACYPLGICAERTAIQKAVSEGYKDFRAIAIASDMQDDFISPCGACRQVMREFGTN |
| LC_(G4S)3_ | WPVYMTKPDGTYIVMTVQELLPSSFGPEDLQKTQGGGGSGGGGSGGGGSGGGGS |
| HC | GGGGSGGGGSGGGGSGGGGSGGGGSGGGGSGGGGSGGGGSDIQMTQSPSSVSAS |
| | VGDRVTITCRASQGISSWLAWYQQKPGKAPKLLIYAASSLQQSGVPSRFSGSGSGT |
| | DFTLTISSLQPEDFATYYCQQTNSEPYTFGGGTKVEIKGGGGSGGGGSGGGGSEVQ |
| | LLESGGGLVQPGGSLRLSCAASGETESSYVMIWVRQAPGKGLEWVSSISGDSVTTY |
| | YADSVKGRFTISRDNSKNTLYLQMNSLRAEDTAVYYCAKGPPTYHTNYYYMDVW |
| | GKGTTVTVSS (SEQ ID NO: 382) |
| CDA_(G4S)112 | MAQKRPACTLKPECVQQLLVCSQEAKKSAYCPYSHFPVGAALLTQEGRIFKGCNIE |
| linker_Ab66_ | NACYPLGICAERTAIQKAVSEGYKDFRAIAIASDMQDDFISPCGACRQVMREFGTN |
| LC_(G4S)3_ | WPVYMTKPDGTYIVMTVQELLPSSFGPEDLQKTQGGGGSGGGGSGGGGSGGGGS |
| HC | GGGGSGGGGSGGGGSGGGGSGGGGSGGGGSGGGGSGGGGSDIQMTQSPSSLSAS |
| | VGDRVTITCRASQSISSYLNWYQQKPGKAPKLLIYAASSLQSGVPSRFSGSGSGTDF |
| | TLTISSLQPEDFATYYCQQSYIAPYTFGGGTKVEIKGGGGSGGGGSGGGGSEVQLV |
| | ESGGGLVQPGGSLRLSCAASGETFSDHYMDWVRQAPGKGLASGETFSDHYMDWV |
| | RQAPGKGLEWVGRIRNKASSYTTEYAASVKGRFTISRDDSKNSLYLQMNSLKTED |
| | TAVYYCAREPKYWIDFDLWGRGTLVTVSS (SEQ ID NO: 383) |
| CDA_(G4S)112 | MAQKRPACTLKPECVQQLLVCSQEAKKSAYCPYSHFPVGAALLTQEGRIFKGCNIE |
| linker_Ab68_ | NACYPLGICAERTAIQKAVSEGYKDFRAIAIASDMQDDFISPCGACRQVMREFGTN |
| LC_(G4S)3_ | WPVYMTKPDGTYIVMTVQELLPSSFGPEDLQKTQGGGGSGGGGSGGGGSGGGGS |
| HC | GGGGSGGGGSGGGGSGGGGSGGGGSGGGGSGGGGSGGGGSDIQMTQSPSSLSAS |
| | VGDRVTITCRASQSISSYLNWYQQKPGKAPKLLIYAASSLQSGVPSRFSGSGSGTDF |
| | TLTISSLQPEDFATYYCQQSYIAPYTFGGGTKVEIKGGGGSGGGGSGGGGSEVQLV |
| | ESGGGLVQPGRSLRLSCTASGFTFSDHDMNWVRQAPGKGLEWVGRTRNAAGSYT |
| | TEYAASVKGRFTISRDDSKNSLYLQMNSLKTEDTAVYYCAREPKYWIDFDLWGRG |
| | TLVTSS (SEQ ID NO: 384) |
| CDA_(G4S)112 | MAQKRPACTLKPECVQQLLVCSQEAKKSAYCPYSHFPVGAALLTQEGRIFKGCNIE |
| linker_Ab69_ | NACYPLGICAERTAIQKAVSEGYKDFRAIAIASDMQDDFISPCGACRQVMREFGTN |
| LC_(G4S)3_ | WPVYMTKPDGTYIVMTVQELLPSSFGPEDLQKTQGGGGSGGGGGGGGSGGGGS |
| HC | GGGGSGGGGSGGGGSGGGGSGGGGSGGGGSGGGGSGGGGSEVQLVESGGGLVQ |
| | PGGSLRLSCAASGETFVDHDMDWVRQAPGKGLEWVGRTRNKLGSYTTEYAASVK |
| | GRETGRDDSKNSLYLQMNSLKTEDTAVYYCAREPKYWIDFDLWGRGTLVTVSSG |
| | GGGSGGGGSGGGGSDIQMTQSPSSLSASVGDRVTITCRASQSISSYLNWYQQKPGK |
| | APKLLIYAASSLQSGVPSRFSGSGSGTDFTLTISSLQPEDFATYYCQQSYIAPYIFGG |
| | GTKVEIK (SEQ ID NO: 385) |
| CDA_G4S | MAQKRPACTLKPECVQQLLVCSQEAKKSAYCPYSHFPVGAALLTQEGRIFKGCNIE |
| linker_Ab58_ | NACYPLGICAERTAIQKAVSEGYKDFRAIAIASDMQDDFISPCGACRQVMREFGTN |
| HC_(G4S)3_ | WPVYMTKPDGTYIVMTVQELLPSSFGPEDLQKTQGGGGSEVQLLESGGGLVQPGG |
| LC | SLRLSCAASGETFSNYAMSWVRQAPGKGLEWVSAISGSGGSTYYADSVKGRFTISR |
| | DNSKNTLYLQMNSLRAEDTAVYYCAKGPPTYHTNYYYMDVWGKGTTVTVSSGG |
| | GGSGGGGSGGGGSDIQMTQSPSSVSASVGDRVTITCRASQGISSWLAWYQQKPGK |
| | APKLLLIYAASSLQSGVPSRFSGSGSGTDFTLTISSLQPEDFATYYCQQTNSFPYTFG |
| | GGTKVEIK (SEQ ID NO: 386) |
| CDA_G4S | MAQKRPACTLKPECVQQLLVCSQEAKKSAYCPYSHFPVGAALLTQEGRIFKGCNIE |
| linker_Ab61_ | NACYPLGICAERTAIQKAVSEGYKDFRAIAIASDMQDDFISPCGACRQVMREFGTN |
| HC_(G4S)3_ | WPVYMTKPDGTYIVMTVQELLPSSFGPEDLQKTQGGGGSEVQLLESGGGLVQPGG |
| LC | SLRLSCAASGETESSYVMIWVRQAPGKGLEWVSSISGDSVTTYYADSVKGRFTISR |
| | DNSKNTLYLQMNSLRAEDTAVYYCAKGPPTYHTNYYYMDVWGKGTTVTVSSGG |
| | GGSGGGGSGGGGSDIQMTQSPSSVSASVGDRVTITCRASQGISSWLAWYQQKPGK |
| | APKLLIYAASSLQQSGVPSRFSGSGSGTDFTLTISSLQPEDFATYYCQQTNSEPYTFG |
| | GGTKVEIK (SEQ ID NO: 387) |
| CDA_G4S | MAQKRPACTLKPECVQQLLVCSQEAKKSAYCPYSHFPVGAALLTQEGRIFKGCNIE |
| linker_Ab66_ | NACYPLGICAERTAIQKAVSEGYKDFRAIAIASDMQDDFISPCGACRQVMREFGTN |
| HC_(G4S)3_ | WPVYMTKPDGTYIVMTVQELLPSSFGPEDLQKTQGGGGSEVQLVESGGGLVQPGG |
| LC | SLRLSCAASGETFSDHYMDWVRQAPGKGLASGETFSDHYMDWVRQAPGKGL |
| | EWVGRIRNKASSYTTEYAASVKGRFTISRDDSKNSLYLQMNSLKTEDTAVYYCAR |
| | EPKYWIDFDLWGRGTLVTVSSGGGGSGGGGSGGGGSDIQMTQSPSSLSASVGDRV |
| | TITCRASQSISSYLNWYQQKPGKAPKLLIYAASSLQSGVPSRFSGSGSGTDFTLTISS |
| | LQPEDFATYYCQQSYIAPYTFGGGTKVEIK (SEQ ID NO: 388) |
| CDA_G4S | MAQKRPACTLKPECVQQLLVCSQEAKKSAYCPYSHFPVGAALLTQEGRIFKGCNIE |
| linker_Ab68_ | NACYPLGICAERTAIQKAVSEGYKDFRAIAIASDMQDDFISPCGACRQVMREFGTN |
| HC_(G4S)3_ | WPVYMTKPDGTYIVMTVQELLPSSFGPEDLQKTQGGGGSEVQLVESGGGLVQPGR |
| LC | SLRLSCTASGFTFSDHDMNWVRQAPGKGLEWVGRTRNAAGSYTTEYAASVKGRF |
| | TISRDDSKNSLYLQMNSLKTEDTAVYYCAREPKYWIDFDLWGRGTLVTSSGGGGS |
| | GGGGSGGGGSDIQMTQSPSSLSASVGDRVTITCRASQSISSYLNWYQQKPGKAPKL |
| | LIYAASSLQSGVPSRFSGSGSGTDFTLTISSLQPEDFATYYCQQSYIAPYTFGGGTKV |
| | EIK (SEQ ID NO: 389) |
| CDA_G4S | MAQKRPACTLKPECVQQLLVCSQEAKKSAYCPYSHFPVGAALLTQEGRIFKGCNIE |
| linker_Ab69_ | NACYPLGICAERTAIQKAVSEGYKDFRAIAIASDMQDDFISPCGACRQVMREFGTN |
| HC_(G4S)3_ | WPVYMTKPDGTYIVMTVQELLPSSFGPEDLQKTQGGGGSDIQMTQSPSSLSASVG |
| LC | DRVTITCRASQSISSYLNWYQQKPGKAPKLLIYAASSLQSGVPSRFSGSGSGTDFTL |
| | TISSLQPEDFATYYCQQSYIAPYIFGGGTKVEIKGGGGSGGGGSGGGGSEVQLVESG |
| | GGLVQPGGSLRLSCAASGETFVDHDMDWVRQAPGKGLEWVGRTRNKLGSYTTE |
| | YAASVKGRETGRDDSKNSLYLQMNSLKTEDTAVYYCAREPKYWIDFDLWGRGTL |
| | VTVSS (SEQ ID NO: 390) |
| CDA_(G4S)3 | MAQKRPACTLKPECVQQLLVCSQEAKKSAYCPYSHFPVGAALLTQEGRIFKGCNIE |
| linker_Ab58_ | NACYPLGICAERTAIQKAVSEGYKDFRAIAIASDMQDDFISPCGACRQVMREFGTN |
| HC_(G4S)3_ | WPVYMTKPDGTYIVMTVQELLPSSFGPEDLQKTQGGGGSGGGGSGGGGSEVQLLE |
| LC | SGGGLVQPGGSLRLSCAASGETFSNYAMSWVRQAPGKGLEWVSAISGSGGSTYYA |
| | DSVKGRFTISRDNSKNTLYLQMNSLRAEDTAVYYCAKGPPTYHTNYYYMDVWGK |
| | GTTVTVSSGGGGSGGGGSGGGGSDIQMTQSPSSVSASVGDRVTITCRASQGISSWL |
| | AWYQQKPGKAPKLLLIYAASSLQSGVPSRFSGSGSGTDFTLTISSLQPEDFATYYCQ |
| | QTNSFPYTFGGGTKVEIK (SEQ ID NO: 391) |
| CDA_(G4S)3 | MAQKRPACTLKPECVQQLLVCSQEAKKSAYCPYSHFPVGAALLTQEGRIFKGCNIE |
| linker_Ab61_ | NACYPLGICAERTAIQKAVSEGYKDFRAIAIASDMQDDFISPCGACRQVMREFGTN |
| HC_(G4S)3_ | WPVYMTKPDGTYIVMTVQELLPSSFGPEDLQKTQGGGGSGGGGSGGGGSEVQLLE |
| LC | SGGGLVQPGGSLRLSCAASGETESSYVMIWVRQAPGKGLEWVSSISGDSVTTYYA |
| | DSVKGRFTISRDNSKNTLYLQMNSLRAEDTAVYYCAKGPPTYHTNYYYMDVWGK |
| | GTTVTVSSGGGGGGGGSGGGGSDIQMTQSPSSVSASVGDRVTITCRASQGISSWL |
| | AWYQQKPGKAPKLLIYAASSLQQSGVPSRFSGSGSGTDFTLTISSLQPEDFATYYCQ |
| | QTNSEPYTFGGGTKVEIK (SEQ ID NO: 392) |
| CDA_(G4S)3 | MAQKRPACTLKPECVQQLLVCSQEAKKSAYCPYSHFPVGAALLTQEGRIFKGCNIE |
| linker_Ab66_ | NACYPLGICAERTAIQKAVSEGYKDFRAIAIASDMQDDFISPCGACRQVMREFGTN |
| HC_(G4S)3_ | WPVYMTKPDGTYIVMTVQELLPSSFGPEDLQKTQGGGGSGGGGSGGGGSEVQLV |
| LC | ESGGGLVQPGGSLRLSCAASGETFSDHYMDWVRQAPGKGLASGETFSDHYMDWV |
| | RQAPGKGLEWVGRIRNKASSYTTEYAASVKGRFTISRDDSKNSLYLQMNSLKTED |
| | TAVYYCAREPKYWIDFDLWGRGTLVTVSSGGGGSGGGGSGGGGSDIQMTQSPSSL |
| | SASVGDRVTITCRASQSISSYLNWYQQKPGKAPKLLIYAASSLQSGVPSRFSGSGSG |
| | TDFTLTISSLQPEDFATYYCQQSYIAPYTFGGGTKVEIK (SEQ ID NO: 393) |
| CDA_(G4S)3 | MAQKRPACTLKPECVQQLLVCSQEAKKSAYCPYSHFPVGAALLTQEGRIFKGCNIE |
| linker_Ab68_ | NACYPLGICAERTAIQKAVSEGYKDFRAIAIASDMQDDFISPCGACRQVMREFGTN |
| HC_(G4S)3_ | WPVYMTKPDGTYIVMTVQELLPSSFGPEDLQKTQGGGGSGGGGSGGGGSEVQLV |
| LC | ESGGGLVQPGRSLRLSCTASGFTFSDHDMNWVRQAPGKGLEWVGRTRNAAGSYT |
| | TEYAASVKGRFTISRDDSKNSLYLQMNSLKTEDTAVYYCAREPKYWIDFDLWGRG |
| | TLVTSSGGGGSGGGGSGGGGSDIQMTQSPSSLSASVGDRVTITCRASQSISSYLNW |
| | YQQKPGKAPKLLIYAASSLQSGVPSRFSGSGSGTDFTLTISSLQPEDFATYYCQQSYI |
| | APYTFGGGTKVEIK (SEQ ID NO: 394) |
| CDA_(G4S)3 | MAQKRPACTLKPECVQQLLVCSQEAKKSAYCPYSHFPVGAALLTQEGRIFKGCNIE |
| linker_Ab69_ | NACYPLGICAERTAIQKAVSEGYKDFRAIAIASDMQDDFISPCGACRQVMREFGTN |
| HC_(G4S)3_ | WPVYMTKPDGTYIVMTVQELLPSSFGPEDLQKTQGGGGSGGGGSGGGGSDIQMT |
| LC | QSPSSLSASVGDRVTITCRASQSISSYLNWYQQKPGKAPKLLIYAASSLQSGVPSRFS |
| | GSGSGTDFTLTISSLQPEDFATYYCQQSYIAPYIFGGGTKVEIKGGGGSGGGGSGGG |
| | GSEVQLVESGGGLVQPGGSLRLSCAASGETFVDHDMDWVRQAPGKGLEWVGRTR |
| | NKLGSYTTEYAASVKGRETGRDDSKNSLYLQMNSLKTEDTAVYYCAREPKYWID |
| | FDLWGRGTLVTVSS (SEQ ID NO: 395) |
| CDA_(G4S)4 | MAQKRPACTLKPECVQQLLVCSQEAKKSAYCPYSHFPVGAALLTQEGRIFKGCNIE |
| linker_Ab58_ | NACYPLGICAERTAIQKAVSEGYKDFRAIAIASDMQDDFISPCGACRQVMREFGTN |
| HC_(G4S)3_ | WPVYMTKPDGTYIVMTVQELLPSSFGPEDLQKTQGGGGSGGGGSGGGGSGGGGS |
| LC | EVQLLESGGGLVQPGGSLRLSCAASGETFSNYAMSWVRQAPGKGLEWVSAISGSG |
| | GSTYYADSVKGRFTISRDNSKNTLYLQMNSLRAEDTAVYYCAKGPPTYHTNYYY |
| | MDVWGKGTTVTVSSGGGGSGGGGSGGGGSDIQMTQSPSSVSASVGDRVTITCRAS |
| | QGISSWLAWYQQKPGKAPKLLLIYAASSLQSGVPSRFSGSGSGTDFTLTISSLQPED |
| | FATYYCQQTNSFPYTFGGGTKVEIK (SEQ ID NO: 396) |
| CDA_(G4S)4 | MAQKRPACTLKPECVQQLLVCSQEAKKSAYCPYSHFPVGAALLTQEGRIFKGCNIE |
| linker_Ab61_ | NACYPLGICAERTAIQKAVSEGYKDFRAIAIASDMQDDFISPCGACRQVMREFGTN |
| HC_(G4S)3_ | WPVYMTKPDGTYIVMTVQELLPSSFGPEDLQKTQGGGGSGGGGSGGGGSGGGGS |
| LC | EVQLLESGGGLVQPGGSLRLSCAASGETESSYVMIWVRQAPGKGLEWVSSISGDSV |
| | TTYYADSVKGRFTISRDNSKNTLYLQMNSLRAEDTAVYYCAKGPPTYHTNYYYM |
| | DVWGKGTTVTVSSGGGGSGGGGSGGGGSDIQMTQSPSSVSASVGDRVTITCRASQ |
| | GISSWLAWYQQKPGKAPKLLIYAASSLQQSGVPSRFSGSGSGTDFTLTISSLQPEDF |
| | ATYYCQQTNSEPYTFGGGTKVEIK (SEQ ID NO: 397) |
| CDA_(G4S)4 | MAQKRPACTLKPECVQQLLVCSQEAKKSAYCPYSHFPVGAALLTQEGRIFKGCNIE |
| linker_Ab66_ | NACYPLGICAERTAIQKAVSEGYKDFRAIAIASDMQDDFISPCGACRQVMREFGTN |
| HC_(G4S)3_ | WPVYMTKPDGTYIVMTVQELLPSSFGPEDLQKTQGGGGSGGGGSGGGGSGGGGS |
| LC | EVQLVESGGGLVQPGGSLRLSCAASGETFSDHYMDWVRQAPGKGLASGETFSDH |
| | YMDWVRQAPGKGLEWVGRIRNKASSYTTEYAASVKGRFTISRDDSKNSLYLQMN |
| | SLKTEDTAVYYCAREPKYWIDFDLWGRGTLVTVSSGGGGSGGGGSGGGGSDIQM |
| | TQSPSSLSASVGDRVTITCRASQSISSYLNWYQQKPGKAPKLLIYAASSLQSGVPSR |
| | FSGSGSGTDFTLTISSLQPEDFATYYCQQSYIAPYTFGGGTKVEIK (SEQ ID NO: |
| | 398) |
| CDA_(G4S)4 | MAQKRPACTLKPECVQQLLVCSQEAKKSAYCPYSHFPVGAALLTQEGRIFKGCNIE |
| linker_Ab68_ | NACYPLGICAERTAIQKAVSEGYKDFRAIAIASDMQDDFISPCGACRQVMREFGTN |
| HC_(G4S)3_ | WPVYMTKPDGTYIVMTVQELLPSSFGPEDLQKTQGGGGSGGGGSGGGGSGGGGS |
| LC | EVQLVESGGGLVQPGRSLRLSCTASGFTFSDHDMNWVRQAPGKGLEWVGRTRNA |
| | AGSYTTEYAASVKGRFTISRDDSKNSLYLQMNSLKTEDTAVYYCAREPKYWIDFD |
| | LWGRGTLVTSSGGGGSGGGGSGGGGSDIQMTQSPSSLSASVGDRVTITCRASQSISS |
| | YLNWYQQKPGKAPKLLIYAASSLQSGVPSRFSGSGSGTDFTLTISSLQPEDFATYYC |
| | QQSYIAPYTFGGGTKVEIK (SEQ ID NO: 399) |
| CDA_(G4S)4 | MAQKRPACTLKPECVQQLLVCSQEAKKSAYCPYSHFPVGAALLTQEGRIFKGCNIE |
| linker_Ab69_ | NACYPLGICAERTAIQKAVSEGYKDFRAIAIASDMQDDFISPCGACRQVMREFGTN |
| HC_(G4S)3_ | WPVYMTKPDGTYIVMTVQELLPSSFGPEDLQKTQGGGGSGGGGSGGGGSGGGGS |
| LC | DIQMTQSPSSLSASVGDRVTITCRASQSISSYLNWYQQKPGKAPKLLIYAASSLQSG |
| | VPSRFSGSGSGTDFTLTISSLQPEDFATYYCQQSYIAPYIFGGGTKVEIKGGGGSGGG |
| | GSGGGGSEVQLVESGGGLVQPGGSLRLSCAASGETFVDHDMDWVRQAPGKGLE |
| | WVGRTRNKLGSYTTEYAASVKGRETGRDDSKNSLYLQMNSLKTEDTAVYYCARE |
| | PKYWIDFDLWGRGTLVTVSS (SEQ ID NO: 400) |
| CDA_(G4S)5 | MAQKRPACTLKPECVQQLLVCSQEAKKSAYCPYSHFPVGAALLTQEGRIFKGCNIE |
| linker_Ab58_ | NACYPLGICAERTAIQKAVSEGYKDFRAIAIASDMQDDFISPCGACRQVMREFGTN |
| HC_(G4S)3_ | WPVYMTKPDGTYIVMTVQELLPSSFGPEDLQKTQGGGGSGGGGSGGGGSGGGGS |
| LC | GGGGSEVQLLESGGGLVQPGGSLRLSCAASGETFSNYAMSWVRQAPGKGLEWVS |
| | AISGSGGSTYYADSVKGRFTISRDNSKNTLYLQMNSLRAEDTAVYYCAKGPPTYH |
| | TNYYYMDVWGKGTTVTVSSGGGGSGGGGSGGGGSDIQMTQSPSSVSASVGDRVT |
| | ITCRASQGISSWLAWYQQKPGKAPKLLLIYAASSLQSGVPSRFSGSGSGTDFTLTISS |
| | LQPEDFATYYCQQTNSFPYTFGGGTKVEIK (SEQ ID NO: 401) |
| CDA_(G4S)5 | MAQKRPACTLKPECVQQLLVCSQEAKKSAYCPYSHFPVGAALLTQEGRIFKGCNIE |
| linker_Ab61_ | NACYPLGICAERTAIQKAVSEGYKDFRAIAIASDMQDDFISPCGACRQVMREFGTN |
| HC_(G4S)3_ | WPVYMTKPDGTYIVMTVQELLPSSFGPEDLQKTQGGGGSGGGGSGGGGSGGGGS |
| LC | GGGGSEVQLLESGGGLVQPGGSLRLSCAASGETESSYVMIWVRQAPGKGLEWVSS |
| | ISGDSVTTYYADSVKGRFTISRDNSKNTLYLQMNSLRAEDTAVYYCAKGPPTYHT |
| | NYYYMDVWGKGTTVTVSSGGGGSGGGGSGGGGSDIQMTQSPSSVSASVGDRVTI |
| | TCRASQGISSWLAWYQQKPGKAPKLLIYAASSLQQSGVPSRFSGSGSGTDFTLTISS |
| | LQPEDFATYYCQQTNSEPYTFGGGTKVEIK (SEQ ID NO: 402) |
| CDA_(G4S)5 | MAQKRPACTLKPECVQQLLVCSQEAKKSAYCPYSHFPVGAALLTQEGRIFKGCNIE |
| linker_Ab66_ | NACYPLGICAERTAIQKAVSEGYKDFRAIAIASDMQDDFISPCGACRQVMREFGTN |
| HC_(G4S)3_ | WPVYMTKPDGTYIVMTVQELLPSSFGPEDLQKTQGGGGSGGGGSGGGGSGGGGS |
| LC | GGGGSEVQLVESGGGLVQPGGSLRLSCAASGETFSDHYMDWVRQAPGKGLASGE |
| | TFSDHYMDWVRQAPGKGLEWVGRIRNKASSYTTEYAASVKGRFTISRDDSKNSLY |
| | LQMNSLKTEDTAVYYCAREPKYWIDFDLWGRGTLVTVSSGGGGSGGGGSGGGGS |
| | DIQMTQSPSSLSASVGDRVTITCRASQSISSYLNWYQQKPGKAPKLLIYAASSLQSG |
| | VPSRFSGSGSGTDFTLTISSLQPEDFATYYCQQSYIAPYTFGGGTKVEIK (SEQ ID |
| | NO: 403) |
| CDA_(G4S)5 | MAQKRPACTLKPECVQQLLVCSQEAKKSAYCPYSHFPVGAALLTQEGRIFKGCNIE |
| linker_Ab68_ | NACYPLGICAERTAIQKAVSEGYKDFRAIAIASDMQDDFISPCGACRQVMREFGTN |
| HC_(G4S)3_ | WPVYMTKPDGTYIVMTVQELLPSSFGPEDLQKTQGGGGSGGGGSGGGGSGGGGS |
| LC | GGGGSEVQLVESGGGLVQPGRSLRLSCTASGFTFSDHDMNWVRQAPGKGLEWVG |
| | RTRNAAGSYTTEYAASVKGRFTISRDDSKNSLYLQMNSLKTEDTAVYYCAREPKY |
| | WIDFDLWGRGTLVTSSGGGGSGGGGSGGGGSDIQMTQSPSSLSASVGDRVTITCRA |
| | SQSISSYLNWYQQKPGKAPKLLIYAASSLQSGVPSRFSGSGSGTDFTLTISSLQPEDF |
| | ATYYCQQSYIAPYTFGGGTKVEIK (SEQ ID NO: 404) |
| CDA_(G4S)5 | MAQKRPACTLKPECVQQLLVCSQEAKKSAYCPYSHFPVGAALLTQEGRIFKGCNIE |
| linker_Ab69_ | NACYPLGICAERTAIQKAVSEGYKDFRAIAIASDMQDDFISPCGACRQVMREFGTN |
| HC_(G4S)3_ | WPVYMTKPDGTYIVMTVQELLPSSFGPEDLQKTQGGGGSGGGGSGGGGSGGGGS |
| LC | GGGGSDIQMTQSPSSLSASVGDRVTITCRASQSISSYLNWYQQKPGKAPKLLIYAAS |
| | SLQSGVPSRFSGSGSGTDFTLTISSLQPEDFATYYCQQSYIAPYIFGGGTKVEIKGGG |
| | GSGGGGSGGGGSEVQLVESGGGLVQPGGSLRLSCAASGETFVDHDMDWVRQAPG |
| | KGLEWVGRTRNKLGSYTTEYAASVKGRETGRDDSKNSLYLQMNSLKTEDTAVYY |
| | CAREPKYWIDFDLWGRGTLVTVSS (SEQ ID NO: 405) |
| CDA_(G4S)6 | MAQKRPACTLKPECVQQLLVCSQEAKKSAYCPYSHFPVGAALLTQEGRIFKGCNIE |
| linker_Ab58_ | NACYPLGICAERTAIQKAVSEGYKDFRAIAIASDMQDDFISPCGACRQVMREFGTN |
| HC_(G4S)3_ | WPVYMTKPDGTYIVMTVQELLPSSFGPEDLQKTQGGGGSGGGGSGGGGSGGGGS |
| LC | GGGGGGGGSEVQLLESGGGLVQPGGSLRLSCAASGETFSNYAMSWVRQAPGKG |
| | LEWVSAISGSGGSTYYADSVKGRFTISRDNSKNTLYLQMNSLRAEDTAVYYCAKG |
| | PPTYHTNYYYMDVWGKGTTVTVSSGGGGSGGGGSGGGGSDIQMTQSPSSVSASV |
| | GDRVTITCRASQGISSWLAWYQQKPGKAPKLLLIYAASSLQSGVPSRFSGSGSGTD |
| | FTLTISSLQPEDFATYYCQQTNSFPYTFGGGTKVEIK (SEQ ID NO: 406) |
| CDA_(G4S)6 | MAQKRPACTLKPECVQQLLVCSQEAKKSAYCPYSHFPVGAALLTQEGRIFKGCNIE |
| linker_Ab61_ | NACYPLGICAERTAIQKAVSEGYKDFRAIAIASDMQDDFISPCGACRQVMREFGTN |
| HC_(G4S)3_ | WPVYMTKPDGTYIVMTVQELLPSSFGPEDLQKTQGGGGSGGGGSGGGGSGGGGS |
| LC | GGGGSGGGGSEVQLLESGGGLVQPGGSLRLSCAASGETESSYVMIWVRQAPGKGL |
| | EWVSSISGDSVTTYYADSVKGRFTISRDNSKNTLYLQMNSLRAEDTAVYYCAKGP |
| | PTYHTNYYYMDVWGKGTTVTVSSGGGGSGGGGSGGGGSDIQMTQSPSSVSASVG |
| | DRVTITCRASQGISSWLAWYQQKPGKAPKLLIYAASSLQQSGVPSRFSGSGSGTDF |
| | TLTISSLQPEDFATYYCQQTNSEPYTFGGGTKVEIK (SEQ ID NO: 407) |
| CDA_(G4S)6 | MAQKRPACTLKPECVQQLLVCSQEAKKSAYCPYSHFPVGAALLTQEGRIFKGCNIE |
| linker_Ab66_ | NACYPLGICAERTAIQKAVSEGYKDFRAIAIASDMQDDFISPCGACRQVMREFGTN |
| HC_(G4S)3_ | WPVYMTKPDGTYIVMTVQELLPSSFGPEDLQKTQGGGGSGGGGSGGGGSGGGGS |
| LC | GGGGSGGGGSEVQLVESGGGLVQPGGSLRLSCAASGETFSDHYMDWVRQAPGKG |
| | LASGETFSDHYMDWVRQAPGKGLEWVGRIRNKASSYTTEYAASVKGRFTISRDDS |
| | KNSLYLQMNSLKTEDTAVYYCAREPKYWIDFDLWGRGTLVTVSSGGGGSGGGGS |
| | GGGGSDIQMTQSPSSLSASVGDRVTITCRASQSISSYLNWYQQKPGKAPKLLIYAAS |
| | SLQSGVPSRFSGSGSGTDFTLTISSLQPEDFATYYCQQSYIAPYTFGGGTKVEIK |
| | (SEQ ID NO: 408) |
| CDA_(G4S)6 | MAQKRPACTLKPECVQQLLVCSQEAKKSAYCPYSHFPVGAALLTQEGRIFKGCNIE |
| linker_Ab68_ | NACYPLGICAERTAIQKAVSEGYKDFRAIAIASDMQDDFISPCGACRQVMREFGTN |
| HC_(G4S)3_ | WPVYMTKPDGTYIVMTVQELLPSSFGPEDLQKTQGGGGSGGGGSGGGGSGGGGS |
| LC | GGGGSGGGGSEVQLVESGGGLVQPGRSLRLSCTASGFTFSDHDMNWVRQAPGKG |
| | LEWVGRTRNAAGSYTTEYAASVKGRFTISRDDSKNSLYLQMNSLKTEDTAVYYC |
| | AREPKYWIDFDLWGRGTLVTSSGGGGSGGGGSGGGGSDIQMTQSPSSLSASVGDR |
| | VTITCRASQSISSYLNWYQQKPGKAPKLLIYAASSLQSGVPSRFSGSGSGTDFTLTIS |
| | SLQPEDFATYYCQQSYIAPYTFGGGTKVEIK (SEQ ID NO: 409) |
| CDA_(G4S)6 | MAQKRPACTLKPECVQQLLVCSQEAKKSAYCPYSHFPVGAALLTQEGRIFKGCNIE |
| linker_Ab69_ | NACYPLGICAERTAIQKAVSEGYKDFRAIAIASDMQDDFISPCGACRQVMREFGTN |
| HC_(G4S)3_ | WPVYMTKPDGTYIVMTVQELLPSSFGPEDLQKTQGGGGSGGGGSGGGGSGGGGS |
| LC | GGGGSGGGGSDIQMTQSPSSLSASVGDRVTITCRASQSISSYLNWYQQKPGKAPKL |
| | LIYAASSLQSGVPSRFSGSGSGTDFTLTISSLQPEDFATYYCQQSYIAPYIFGGGTKV |
| | EIKGGGGSGGGGSGGGGSEVQLVESGGGLVQPGGSLRLSCAASGETFVDHDMDW |
| | VRQAPGKGLEWVGRTRNKLGSYTTEYAASVKGRETGRDDSKNSLYLQMNSLKTE |
| | DTAVYYCAREPKYWIDFDLWGRGTLVTVSS (SEQ ID NO: 410) |
| CDA_(G4S)7 | MAQKRPACTLKPECVQQLLVCSQEAKKSAYCPYSHFPVGAALLTQEGRIFKGCNIE |
| linker_Ab58_ | NACYPLGICAERTAIQKAVSEGYKDFRAIAIASDMQDDFISPCGACRQVMREFGTN |
| HC_(G4S)3_ | WPVYMTKPDGTYIVMTVQELLPSSFGPEDLQKTQGGGGSGGGGSGGGGSGGGGS |
| LC | GGGGSGGGGSGGGGSEVQLLESGGGLVQPGGSLRLSCAASGETFSNYAMSWVRQ |
| | APGKGLEWVSAISGSGGSTYYADSVKGRFTISRDNSKNTLYLQMNSLRAEDTAVY |
| | YCAKGPPTYHTNYYYMDVWGKGTTVTVSSGGGGSGGGGSGGGGSDIQMTQSPSS |
| | VSASVGDRVTITCRASQGISSWLAWYQQKPGKAPKLLLIYAASSLQSGVPSRFSGS |
| | GSGTDFTLTISSLQPEDFATYYCQQTNSFPYTFGGGTKVEIK (SEQ ID NO: 411) |
| CDA_(G4S)7 | MAQKRPACTLKPECVQQLLVCSQEAKKSAYCPYSHFPVGAALLTQEGRIFKGCNIE |
| linker_Ab61_ | NACYPLGICAERTAIQKAVSEGYKDFRAIAIASDMQDDFISPCGACRQVMREFGTN |
| HC_(G4S)3_ | WPVYMTKPDGTYIVMTVQELLPSSFGPEDLQKTQGGGGSGGGGSGGGGSGGGGS |
| LC | GGGGSGGGGSGGGGSEVQLLESGGGLVQPGGSLRLSCAASGETESSYVMIWVRQA |
| | PGKGLEWVSSISGDSVTTYYADSVKGRFTISRDNSKNTLYLQMNSLRAEDTAVYY |
| | CAKGPPTYHTNYYYMDVWGKGTTVTVSSGGGGSGGGGSGGGGSDIQMTQSPSSV |
| | SASVGDRVTITCRASQGISSWLAWYQQKPGKAPKLLIYAASSLQQSGVPSRFSGSG |
| | SGTDFTLTISSLQPEDFATYYCQQTNSEPYTFGGGTKVEIK (SEQ ID NO: 412) |
| CDA_(G4S)7 | MAQKRPACTLKPECVQQLLVCSQEAKKSAYCPYSHFPVGAALLTQEGRIFKGCNIE |
| linker_Ab66_ | NACYPLGICAERTAIQKAVSEGYKDFRAIAIASDMQDDFISPCGACRQVMREFGTN |
| HC_(G4S)3_ | WPVYMTKPDGTYIVMTVQELLPSSFGPEDLQKTQGGGGSGGGGSGGGGSGGGGS |
| LC | GGGGSGGGGSGGGGSEVQLVESGGGLVQPGGSLRLSCAASGETFSDHYMDWVRQ |
| | APGKGLASGETFSDHYMDWVRQAPGKGLEWVGRIRNKASSYTTEYAASVKGRFT |
| | ISRDDSKNSLYLQMNSLKTEDTAVYYCAREPKYWIDFDLWGRGTLVTVSSGGGGS |
| | GGGGSGGGGSDIQMTQSPSSLSASVGDRVTITCRASQSISSYLNWYQQKPGKAPKL |
| | LIYAASSLQSGVPSRFSGSGSGTDFTLTISSLQPEDFATYYCQQSYIAPYTFGGGTKV |
| | EIK (SEQ ID NO: 413) |
| CDA_(G4S)7 | MAQKRPACTLKPECVQQLLVCSQEAKKSAYCPYSHFPVGAALLTQEGRIFKGCNIE |
| linker_Ab68_ | NACYPLGICAERTAIQKAVSEGYKDFRAIAIASDMQDDFISPCGACRQVMREFGTN |
| HC_(G4S)3_ | WPVYMTKPDGTYIVMTVQELLPSSFGPEDLQKTQGGGGSGGGGSGGGGSGGGGS |
| LC | GGGGSGGGGSGGGGSEVQLVESGGGLVQPGRSLRLSCTASGFTFSDHDMNWVRQ |
| | APGKGLEWVGRTRNAAGSYTTEYAASVKGRFTISRDDSKNSLYLQMNSLKTEDTA |
| | VYYCAREPKYWIDFDLWGRGTLVTSSGGGGSGGGGSGGGGSDIQMTQSPSSLSAS |
| | VGDRVTITCRASQSISSYLNWYQQKPGKAPKLLIYAASSLQSGVPSRFSGSGSGTDF |
| | TLTISSLQPEDFATYYCQQSYIAPYTFGGGTKVEIK (SEQ ID NO: 414) |
| CDA_(G4S)7 | MAQKRPACTLKPECVQQLLVCSQEAKKSAYCPYSHFPVGAALLTQEGRIFKGCNIE |
| linker_Ab69_ | NACYPLGICAERTAIQKAVSEGYKDFRAIAIASDMQDDFISPCGACRQVMREFGTN |
| HC_(G4S)3_ | WPVYMTKPDGTYIVMTVQELLPSSFGPEDLQKTQGGGGSGGGGSGGGGSGGGGS |
| LC | GGGGGGGGSGGGGSDIQMTQSPSSLSASVGDRVTITCRASQSISSYLNWYQQKPG |
| | KAPKLLIYAASSLQSGVPSRFSGSGSGTDFTLTISSLQPEDFATYYCQQSYIAPYIFG |
| | GGTKVEIKGGGGSGGGGSGGGGSEVQLVESGGGLVQPGGSLRLSCAASGETFVDH |
| | DMDWVRQAPGKGLEWVGRTRNKLGSYTTEYAASVKGRETGRDDSKNSLYLQMN |
| | SLKTEDTAVYYCAREPKYWIDFDLWGRGTLVTVSS (SEQ ID NO: 415) |
| CDA_(G4S)8 | MAQKRPACTLKPECVQQLLVCSQEAKKSAYCPYSHFPVGAALLTQEGRIFKGCNIE |
| linker_Ab58_ | NACYPLGICAERTAIQKAVSEGYKDFRAIAIASDMQDDFISPCGACRQVMREFGTN |
| HC_(G4S)3_ | WPVYMTKPDGTYIVMTVQELLPSSFGPEDLQKTQGGGGSGGGGSGGGGSGGGGS |
| LC | GGGGSGGGGSGGGGSGGGGSEVQLLESGGGLVQPGGSLRLSCAASGETFSNYAMS |
| | WVRQAPGKGLEWVSAISGSGGSTYYADSVKGRFTISRDNSKNTLYLQMNSLRAED |
| | TAVYYCAKGPPTYHTNYYYMDVWGKGTTVTVSSGGGGSGGGGSGGGGSDIQMT |
| | QSPSSVSASVGDRVTITCRASQGISSWLAWYQQKPGKAPKLLLIYAASSLQSGVPSR |
| | FSGSGSGTDFTLTISSLQPEDFATYYCQQTNSFPYTFGGGTKVEIK (SEQ ID NO: |
| | 416) |
| CDA_(G4S)8 | MAQKRPACTLKPECVQQLLVCSQEAKKSAYCPYSHFPVGAALLTQEGRIFKGCNIE |
| linker_Ab61_ | NACYPLGICAERTAIQKAVSEGYKDFRAIAIASDMQDDFISPCGACRQVMREFGTN |
| HC_(G4S)3_ | WPVYMTKPDGTYIVMTVQELLPSSFGPEDLQKTQGGGGSGGGGSGGGGSGGGGS |
| LC | GGGGSGGGGSGGGGSGGGGSEVQLLESGGGLVQPGGSLRLSCAASGETESSYVMI |
| | WVRQAPGKGLEWVSSISGDSVTTYYADSVKGRFTISRDNSKNTLYLQMNSLRAED |
| | TAVYYCAKGPPTYHTNYYYMDVWGKGTTVTVSSGGGGSGGGGSGGGGSDIQMT |
| | QSPSSVSASVGDRVTITCRASQGISSWLAWYQQKPGKAPKLLIYAASSLQQSGVPS |
| | RFSGSGSGTDFTLTISSLQPEDFATYYCQQTNSEPYTFGGGTKVEIK (SEQ ID NO: |
| | 417) |
| CDA_(G4S)8 | MAQKRPACTLKPECVQQLLVCSQEAKKSAYCPYSHFPVGAALLTQEGRIFKGCNIE |
| linker_Ab66_ | NACYPLGICAERTAIQKAVSEGYKDFRAIAIASDMQDDFISPCGACRQVMREFGTN |
| HC_(G4S)3_ | WPVYMTKPDGTYIVMTVQELLPSSFGPEDLQKTQGGGGSGGGGSGGGGSGGGGS |
| LC | GGGGSGGGGSGGGGSGGGGSEVQLVESGGGLVQPGGSLRLSCAASGETFSDHYM |
| | DWVRQAPGKGLASGETFSDHYMDWVRQAPGKGLEWVGRIRNKASSYTTEYAAS |
| | VKGRFTISRDDSKNSLYLQMNSLKTEDTAVYYCAREPKYWIDFDLWGRGTLVTVS |
| | SGGGGSGGGGSGGGGSDIQMTQSPSSLSASVGDRVTITCRASQSISSYLNWYQQKP |
| | GKAPKLLIYAASSLQSGVPSRFSGSGSGTDFTLTISSLQPEDFATYYCQQSYIAPYTF |
| | GGGTKVEIK (SEQ ID NO: 418) |
| CDA_(G4S)8 | MAQKRPACTLKPECVQQLLVCSQEAKKSAYCPYSHFPVGAALLTQEGRIFKGCNIE |
| linker_Ab68_ | NACYPLGICAERTAIQKAVSEGYKDFRAIAIASDMQDDFISPCGACRQVMREFGTN |
| HC_(G4S)3_ | WPVYMTKPDGTYIVMTVQELLPSSFGPEDLQKTQGGGGSGGGGSGGGGSGGGGS |
| LC | GGGGSGGGGGGGGSGGGGSEVQLVESGGGLVQPGRSLRLSCTASGFTFSDHDM |
| | NWVRQAPGKGLEWVGRTRNAAGSYTTEYAASVKGRFTISRDDSKNSLYLQMNSL |
| | KTEDTAVYYCAREPKYWIDFDLWGRGTLVTSSGGGGSGGGGSGGGGSDIQMTQS |
| | PSSLSASVGDRVTITCRASQSISSYLNWYQQKPGKAPKLLIYAASSLQSGVPSRFSGS |
| | GSGTDFTLTISSLQPEDFATYYCQQSYIAPYTFGGGTKVEIK (SEQ ID NO: 419) |
| CDA_(G4S)8 | MAQKRPACTLKPECVQQLLVCSQEAKKSAYCPYSHFPVGAALLTQEGRIFKGCNIE |
| linker_Ab69_ | NACYPLGICAERTAIQKAVSEGYKDFRAIAIASDMQDDFISPCGACRQVMREFGTN |
| HC_(G4S)3_ | WPVYMTKPDGTYIVMTVQELLPSSFGPEDLQKTQGGGGSGGGGSGGGGSGGGGS |
| LC | GGGGSGGGGSGGGGSGGGGSDIQMTQSPSSLSASVGDRVTITCRASQSISSYLNWY |
| | QQKPGKAPKLLIYAASSLQSGVPSRFSGSGSGTDFTLTISSLQPEDFATYYCQQSYIA |
| | PYIFGGGTKVEIKGGGGSGGGGSGGGGSEVQLVESGGGLVQPGGSLRLSCAASGET |
| | FVDHDMDWVRQAPGKGLEWVGRTRNKLGSYTTEYAASVKGRETGRDDSKNSLY |
| | LQMNSLKTEDTAVYYCAREPKYWIDFDLWGRGTLVTVSS (SEQ ID NO: 420) |
| CDA_(G4S)9 | MAQKRPACTLKPECVQQLLVCSQEAKKSAYCPYSHFPVGAALLTQEGRIFKGCNIE |
| linker_Ab58_ | NACYPLGICAERTAIQKAVSEGYKDFRAIAIASDMQDDFISPCGACRQVMREFGTN |
| HC_(G4S)3_ | WPVYMTKPDGTYIVMTVQELLPSSFGPEDLQKTQGGGGSGGGGSGGGGSGGGGS |
| LC | GGGGSGGGGSGGGGSGGGGSGGGGSEVQLLESGGGLVQPGGSLRLSCAASGETFS |
| | NYAMSWVRQAPGKGLEWVSAISGSGGSTYYADSVKGRFTISRDNSKNTLYLQMN |
| | SLRAEDTAVYYCAKGPPTYHTNYYYMDVWGKGTTVTVSSGGGGSGGGGSGGGG |
| | SDIQMTQSPSSVSASVGDRVTITCRASQGISSWLAWYQQKPGKAPKLLLIYAASSL |
| | QSGVPSRFSGSGSGTDFTLTISSLQPEDFATYYCQQTNSFPYTFGGGTKVEIK (SEQ |
| | ID NO: 421) |
| CDA_(G4S)9 | MAQKRPACTLKPECVQQLLVCSQEAKKSAYCPYSHFPVGAALLTQEGRIFKGCNIE |
| linker_Ab61_ | NACYPLGICAERTAIQKAVSEGYKDFRAIAIASDMQDDFISPCGACRQVMREFGTN |
| HC_(G4S)3_ | WPVYMTKPDGTYIVMTVQELLPSSFGPEDLQKTQGGGGSGGGGSGGGGSGGGGS |
| LC | GGGGSGGGGSGGGGSGGGGSGGGGSEVQLLESGGGLVQPGGSLRLSCAASGETES |
| | SYVMIWVRQAPGKGLEWVSSISGDSVTTYYADSVKGRFTISRDNSKNTLYLQMNS |
| | LRAEDTAVYYCAKGPPTYHTNYYYMDVWGKGTTVTVSSGGGGSGGGGSGGGGS |
| | DIQMTQSPSSVSASVGDRVTITCRASQGISSWLAWYQQKPGKAPKLLIYAASSLQQ |
| | SGVPSRFSGSGSGTDFTLTISSLQPEDFATYYCQQTNSEPYTFGGGTKVEIK (SEQ ID |
| | NO: 422) |
| CDA_(G4S)9 | MAQKRPACTLKPECVQQLLVCSQEAKKSAYCPYSHFPVGAALLTQEGRIFKGCNIE |
| linker_Ab66_ | NACYPLGICAERTAIQKAVSEGYKDFRAIAIASDMQDDFISPCGACRQVMREFGTN |
| HC_(G4S)3_ | WPVYMTKPDGTYIVMTVQELLPSSFGPEDLQKTQGGGGSGGGGSGGGGSGGGGS |
| LC | GGGGSGGGGSGGGGSGGGGSGGGGSEVQLVESGGGLVQPGGSLRLSCAASGETFS |
| | DHYMDWVRQAPGKGLASGETFSDHYMDWVRQAPGKGLEWVGRIRNKASSYTTE |
| | YAASVKGRFTISRDDSKNSLYLQMNSLKTEDTAVYYCAREPKYWIDFDLWGRGTL |
| | VTVSSGGGGGGGGSGGGGSDIQMTQSPSSLSASVGDRVTITCRASQSISSYLNWY |
| | QQKPGKAPKLLIYAASSLQSGVPSRFSGSGSGTDFTLTISSLQPEDFATYYCQQSYIA |
| | PYTFGGGTKVEIK (SEQ ID NO: 423) |
| CDA_(G4S)9 | MAQKRPACTLKPECVQQLLVCSQEAKKSAYCPYSHFPVGAALLTQEGRIFKGCNIE |
| linker_Ab68_ | NACYPLGICAERTAIQKAVSEGYKDFRAIAIASDMQDDFISPCGACRQVMREFGTN |
| HC_(G4S)3_ | WPVYMTKPDGTYIVMTVQELLPSSFGPEDLQKTQGGGGSGGGGSGGGGSGGGGS |
| LC | GGGGSGGGGSGGGGSGGGGSGGGGSEVQLVESGGGLVQPGRSLRLSCTASGFTFS |
| | DHDMNWVRQAPGKGLEWVGRTRNAAGSYTTEYAASVKGRFTISRDDSKNSLYLQ |
| | MNSLKTEDTAVYYCAREPKYWIDFDLWGRGTLVTSSGGGGSGGGGSGGGGSDIQ |
| | MTQSPSSLSASVGDRVTITCRASQSISSYLNWYQQKPGKAPKLLIYAASSLQSGVPS |
| | RFSGSGSGTDFTLTISSLQPEDFATYYCQQSYIAPYTFGGGTKVEIK (SEQ ID NO: |
| | 424) |
| CDA_(G4S)9 | MAQKRPACTLKPECVQQLLVCSQEAKKSAYCPYSHFPVGAALLTQEGRIFKGCNIE |
| linker_Ab69_ | NACYPLGICAERTAIQKAVSEGYKDFRAIAIASDMQDDFISPCGACRQVMREFGTN |
| HC_(G4S)3_ | WPVYMTKPDGTYIVMTVQELLPSSFGPEDLQKTQGGGGSGGGGSGGGGSGGGGS |
| LC | GGGGSGGGGSGGGGSGGGGSGGGGSDIQMTQSPSSLSASVGDRVTITCRASQSISS |
| | YLNWYQQKPGKAPKLLIYAASSLQSGVPSRFSGSGSGTDFTLTISSLQPEDFATYYC |
| | QQSYIAPYIFGGGTKVEIKGGGGSGGGGSGGGGSEVQLVESGGGLVQPGGSLRLSC |
| | AASGETFVDHDMDWVRQAPGKGLEWVGRTRNKLGSYTTEYAASVKGRETGRDD |
| | SKNSLYLQMNSLKTEDTAVYYCAREPKYWIDFDLWGRGTLVTVSS (SEQ ID NO: |
| | 425) |
| CDA_(G4S)10 | MAQKRPACTLKPECVQQLLVCSQEAKKSAYCPYSHFPVGAALLTQEGRIFKGCNIE |
| linker_Ab58_ | NACYPLGICAERTAIQKAVSEGYKDFRAIAIASDMQDDFISPCGACRQVMREFGTN |
| HC_(G4S)3_ | WPVYMTKPDGTYIVMTVQELLPSSFGPEDLQKTQGGGGSGGGGSGGGGSGGGGS |
| LC | GGGGSGGGGSGGGGSGGGGSGGGGSGGGGSEVQLLESGGGLVQPGGSLRLSCAA |
| | SGETFSNYAMSWVRQAPGKGLEWVSAISGSGGSTYYADSVKGRFTISRDNSKNTL |
| | YLQMNSLRAEDTAVYYCAKGPPTYHTNYYYMDVWGKGTTVTVSSGGGGSGGGG |
| | SGGGGSDIQMTQSPSSVSASVGDRVTITCRASQGISSWLAWYQQKPGKAPKLLLIY |
| | AASSLQSGVPSRFSGSGSGTDFTLTISSLQPEDFATYYCQQTNSFPYTFGGGTKVEIK |
| | (SEQ ID NO: 426) |
| CDA_(G4S)10 | MAQKRPACTLKPECVQQLLVCSQEAKKSAYCPYSHFPVGAALLTQEGRIFKGCNIE |
| linker_Ab61_ | NACYPLGICAERTAIQKAVSEGYKDFRAIAIASDMQDDFISPCGACRQVMREFGTN |
| HC_(G4S)3_ | WPVYMTKPDGTYIVMTVQELLPSSFGPEDLQKTQGGGGSGGGGSGGGGSGGGGS |
| LC | GGGGSGGGGSGGGGSGGGGSGGGGSGGGGSEVQLLESGGGLVQPGGSLRLSCAA |
| | SGETESSYVMIWVRQAPGKGLEWVSSISGDSVTTYYADSVKGRFTISRDNSKNTLY |
| | LQMNSLRAEDTAVYYCAKGPPTYHTNYYYMDVWGKGTTVTVSSGGGGSGGGGS |
| | GGGGSDIQMTQSPSSVSASVGDRVTITCRASQGISSWLAWYQQKPGKAPKLLIYAA |
| | SSLQQSGVPSRFSGSGSGTDFTLTISSLQPEDFATYYCQQTNSEPYTFGGGTKVEIK |
| | (SEQ ID NO: 427) |
| CDA_(G4S)10 | MAQKRPACTLKPECVQQLLVCSQEAKKSAYCPYSHFPVGAALLTQEGRIFKGCNIE |
| linker_Ab66_ | NACYPLGICAERTAIQKAVSEGYKDFRAIAIASDMQDDFISPCGACRQVMREFGTN |
| HC_(G4S)3_ | WPVYMTKPDGTYIVMTVQELLPSSFGPEDLQKTQGGGGSGGGGSGGGGSGGGGS |
| LC | GGGGSGGGGSGGGGSGGGGSGGGGSGGGGSEVQLVESGGGLVQPGGSLRLSCAA |
| | SGETFSDHYMDWVRQAPGKGLASGETFSDHYMDWVRQAPGKGLEWVGRIRNKA |
| | SSYTTEYAASVKGRFTISRDDSKNSLYLQMNSLKTEDTAVYYCAREPKYWIDFDL |
| | WGRGTLVTVSSGGGGSGGGGSGGGGSDIQMTQSPSSLSASVGDRVTITCRASQSIS |
| | SYLNWYQQKPGKAPKLLIYAASSLQSGVPSRFSGSGSGTDFTLTISSLQPEDFATYY |
| | CQQSYIAPYTFGGGTKVEIK (SEQ ID NO: 428) |
| CDA_(G4S)10 | MAQKRPACTLKPECVQQLLVCSQEAKKSAYCPYSHFPVGAALLTQEGRIFKGCNIE |
| linker_Ab68_ | NACYPLGICAERTAIQKAVSEGYKDFRAIAIASDMQDDFISPCGACRQVMREFGTN |
| HC_(G4S)3_ | WPVYMTKPDGTYIVMTVQELLPSSFGPEDLQKTQGGGGSGGGGSGGGGSGGGGS |
| LC | GGGGSGGGGSGGGGSGGGGSGGGGSGGGGSEVQLVESGGGLVQPGRSLRLSCTA |
| | SGFTFSDHDMNWVRQAPGKGLEWVGRTRNAAGSYTTEYAASVKGRFTISRDDSK |
| | NSLYLQMNSLKTEDTAVYYCAREPKYWIDFDLWGRGTLVTSSGGGGSGGGGSGG |
| | GGSDIQMTQSPSSLSASVGDRVTITCRASQSISSYLNWYQQKPGKAPKLLIYAASSL |
| | QSGVPSRFSGSGSGTDFTLTISSLQPEDFATYYCQQSYIAPYTFGGGTKVEIK (SEQ |
| | ID NO: 429) |
| CDA_(G4S)10 | MAQKRPACTLKPECVQQLLVCSQEAKKSAYCPYSHFPVGAALLTQEGRIFKGCNIE |
| linker_Ab69_ | NACYPLGICAERTAIQKAVSEGYKDFRAIAIASDMQDDFISPCGACRQVMREFGTN |
| HC_(G4S)3_ | WPVYMTKPDGTYIVMTVQELLPSSFGPEDLQKTQGGGGSGGGGSGGGGSGGGGS |
| LC | GGGGSGGGGSGGGGSGGGGSGGGGSGGGGSDIQMTQSPSSLSASVGDRVTITCRA |
| | SQSISSYLNWYQQKPGKAPKLLIYAASSLQSGVPSRFSGSGSGTDFTLTISSLQPEDF |
| | ATYYCQQSYIAPYIFGGGTKVEIKGGGGSGGGGSGGGGSEVQLVESGGGLVQPGG |
| | SLRLSCAASGETFVDHDMDWVRQAPGKGLEWVGRTRNKLGSYTTEYAASVKGRE |
| | TGRDDSKNSLYLQMNSLKTEDTAVYYCAREPKYWIDFDLWGRGTLVTVSS (SEQ |
| | ID NO: 430) |
| CDA_(G4S)11 | MAQKRPACTLKPECVQQLLVCSQEAKKSAYCPYSHFPVGAALLTQEGRIFKGCNIE |
| linker_Ab58_ | NACYPLGICAERTAIQKAVSEGYKDFRAIAIASDMQDDFISPCGACRQVMREFGTN |
| HC_(G4S)3_ | WPVYMTKPDGTYIVMTVQELLPSSFGPEDLQKTQGGGGSGGGGSGGGGSGGGGS |
| LC | GGGGSGGGGSGGGGSGGGGSGGGGSGGGGSGGGGSEVQLLESGGGLVQPGGSLR |
| | LSCAASGETFSNYAMSWVRQAPGKGLEWVSAISGSGGSTYYADSVKGRFTISRDN |
| | SKNTLYLQMNSLRAEDTAVYYCAKGPPTYHTNYYYMDVWGKGTTVTVSSGGGG |
| | SGGGGSGGGGSDIQMTQSPSSVSASVGDRVTITCRASQGISSWLAWYQQKPGKAP |
| | KLLLIYAASSLQSGVPSRFSGSGSGTDFTLTISSLQPEDFATYYCQQTNSFPYTFGGG |
| | TKVEIK (SEQ ID NO: 431) |
| CDA_(G4S)11 | MAQKRPACTLKPECVQQLLVCSQEAKKSAYCPYSHFPVGAALLTQEGRIFKGCNIE |
| linker_Ab61_ | NACYPLGICAERTAIQKAVSEGYKDFRAIAIASDMQDDFISPCGACRQVMREFGTN |
| HC_(G4S)3_ | WPVYMTKPDGTYIVMTVQELLPSSFGPEDLQKTQGGGGSGGGGSGGGGSGGGGS |
| LC | GGGGSGGGGGGGGSGGGGSGGGGSGGGGSGGGGSEVQLLESGGGLVQPGGSLR |
| | LSCAASGETESSYVMIWVRQAPGKGLEWVSSISGDSVTTYYADSVKGRFTISRDNS |
| | KNTLYLQMNSLRAEDTAVYYCAKGPPTYHTNYYYMDVWGKGTTVTVSSGGGGS |
| | GGGGSGGGGSDIQMTQSPSSVSASVGDRVTITCRASQGISSWLAWYQQKPGKAPK |
| | LLIYAASSLQQSGVPSRFSGSGSGTDFTLTISSLQPEDFATYYCQQTNSEPYTFGGGT |
| | KVEIK (SEQ ID NO: 432) |
| CDA_(G4S)11 | MAQKRPACTLKPECVQQLLVCSQEAKKSAYCPYSHFPVGAALLTQEGRIFKGCNIE |
| linker_Ab66_ | NACYPLGICAERTAIQKAVSEGYKDFRAIAIASDMQDDFISPCGACRQVMREFGTN |
| HC_(G4S)3_ | WPVYMTKPDGTYIVMTVQELLPSSFGPEDLQKTQGGGGSGGGGSGGGGSGGGGS |
| LC | GGGGSGGGGSGGGGSGGGGSGGGGSGGGGSGGGGSEVQLVESGGGLVQPGGSLR |
| | LSCAASGETFSDHYMDWVRQAPGKGLASGETFSDHYMDWVRQAPGKGLEWVGR |
| | IRNKASSYTTEYAASVKGRFTISRDDSKNSLYLQMNSLKTEDTAVYYCAREPKYWI |
| | DFDLWGRGTLVTVSSGGGGSGGGGSGGGGSDIQMTQSPSSLSASVGDRVTITCRAS |
| | QSISSYLNWYQQKPGKAPKLLIYAASSLQSGVPSRFSGSGSGTDFTLTISSLQPEDFA |
| | TYYCQQSYIAPYTFGGGTKVEIK (SEQ ID NO: 433) |
| CDA_(G4S)11 | MAQKRPACTLKPECVQQLLVCSQEAKKSAYCPYSHFPVGAALLTQEGRIFKGCNIE |
| linker_Ab68_ | NACYPLGICAERTAIQKAVSEGYKDFRAIAIASDMQDDFISPCGACRQVMREFGTN |
| HC_(G4S)3_ | WPVYMTKPDGTYIVMTVQELLPSSFGPEDLQKTQGGGGSGGGGSGGGGSGGGGS |
| LC | GGGGSGGGGSGGGGSGGGGSGGGGSGGGGSGGGGSEVQLVESGGGLVQPGRSLR |
| | LSCTASGFTFSDHDMNWVRQAPGKGLEWVGRTRNAAGSYTTEYAASVKGRFTIS |
| | RDDSKNSLYLQMNSLKTEDTAVYYCAREPKYWIDFDLWGRGTLVTSSGGGGSGG |
| | GGSGGGGSDIQMTQSPSSLSASVGDRVTITCRASQSISSYLNWYQQKPGKAPKLLIY |
| | AASSLQSGVPSRFSGSGSGTDFTLTISSLQPEDFATYYCQQSYIAPYTFGGGTKVEIK |
| | (SEQ ID NO: 434) |
| CDA_(G4S)11 | MAQKRPACTLKPECVQQLLVCSQEAKKSAYCPYSHFPVGAALLTQEGRIFKGCNIE |
| linker_Ab69_ | NACYPLGICAERTAIQKAVSEGYKDFRAIAIASDMQDDFISPCGACRQVMREFGTN |
| HC_(G4S)3_ | WPVYMTKPDGTYIVMTVQELLPSSFGPEDLQKTQGGGGSGGGGSGGGGSGGGGS |
| LC | GGGGSGGGGSGGGGSGGGGSGGGGSGGGGSGGGGSDIQMTQSPSSLSASVGDRV |
| | TITCRASQSISSYLNWYQQKPGKAPKLLIYAASSLQSGVPSRFSGSGSGTDFTLTISS |
| | LQPEDFATYYCQQSYIAPYIFGGGTKVEIKGGGGSGGGGSGGGGSEVQLVESGGGL |
| | VQPGGSLRLSCAASGETFVDHDMDWVRQAPGKGLEWVGRTRNKLGSYTTEYAAS |
| | VKGRETGRDDSKNSLYLQMNSLKTEDTAVYYCAREPKYWIDFDLWGRGTLVTVS |
| | S (SEQ ID NO: 435) |
| CDA_(G4S)112 | MAQKRPACTLKPECVQQLLVCSQEAKKSAYCPYSHFPVGAALLTQEGRIFKGCNIE |
| linker_Ab58_ | NACYPLGICAERTAIQKAVSEGYKDFRAIAIASDMQDDFISPCGACRQVMREFGTN |
| HC_(G4S)3_ | WPVYMTKPDGTYIVMTVQELLPSSFGPEDLQKTQGGGGSGGGGSGGGGSGGGGS |
| LC | GGGGSGGGGSGGGGSGGGGSGGGGSGGGGSGGGGSGGGGSEVQLLESGGGLVQP |
| | GGSLRLSCAASGETFSNYAMSWVRQAPGKGLEWVSAISGSGGSTYYADSVKGRFT |
| | ISRDNSKNTLYLQMNSLRAEDTAVYYCAKGPPTYHTNYYYMDVWGKGTTVTVSS |
| | GGGGSGGGGSGGGGSDIQMTQSPSSVSASVGDRVTITCRASQGISSWLAWYQQKP |
| | GKAPKLLLIYAASSLQSGVPSRFSGSGSGTDFTLTISSLQPEDFATYYCQQTNSFPYT |
| | FGGGTKVEIK (SEQ ID NO: 436) |
| CDA_(G4S)112 | MAQKRPACTLKPECVQQLLVCSQEAKKSAYCPYSHFPVGAALLTQEGRIFKGCNIE |
| linker_Ab61_ | NACYPLGICAERTAIQKAVSEGYKDFRAIAIASDMQDDFISPCGACRQVMREFGTN |
| HC_(G4S)3_ | WPVYMTKPDGTYIVMTVQELLPSSFGPEDLQKTQGGGGSGGGGSGGGGSGGGGS |
| LC | GGGGSGGGGSGGGGSGGGGSGGGGSGGGGSGGGGSGGGGSEVQLLESGGGLVQP |
| | GGSLRLSCAASGETESSYVMIWVRQAPGKGLEWVSSISGDSVTTYYADSVKGRFTI |
| | SRDNSKNTLYLQMNSLRAEDTAVYYCAKGPPTYHTNYYYMDVWGKGTTVTVSS |
| | GGGGSGGGGSGGGGSDIQMTQSPSSVSASVGDRVTITCRASQGISSWLAWYQQKP |
| | GKAPKLLIYAASSLQQSGVPSRFSGSGSGTDFTLTISSLQPEDFATYYCQQTNSEPYT |
| | FGGGTKVEIK (SEQ ID NO: 437) |
| CDA_(G4S)112 | MAQKRPACTLKPECVQQLLVCSQEAKKSAYCPYSHFPVGAALLTQEGRIFKGCNIE |
| linker_Ab66_ | NACYPLGICAERTAIQKAVSEGYKDFRAIAIASDMQDDFISPCGACRQVMREFGTN |
| HC_(G4S)3_ | WPVYMTKPDGTYIVMTVQELLPSSFGPEDLQKTQGGGGSGGGGSGGGGSGGGGS |
| LC | GGGGSGGGGSGGGGSGGGGSGGGGSGGGGSGGGGSGGGGSEVQLVESGGGLVQ |
| | PGGSLRLSCAASGETFSDHYMDWVRQAPGKGLASGETFSDHYMDWVRQAPGKG |
| | LEWVGRIRNKASSYTTEYAASVKGRFTISRDDSKNSLYLQMNSLKTEDTAVYYCA |
| | REPKYWIDFDLWGRGTLVTVSSGGGGSGGGGSGGGGSDIQMTQSPSSLSASVGDR |
| | VTITCRASQSISSYLNWYQQKPGKAPKLLIYAASSLQSGVPSRFSGSGSGTDFTLTIS |
| | SLQPEDFATYYCQQSYIAPYTFGGGTKVEIK (SEQ ID NO: 438) |
| CDA_(G4S)112 | MAQKRPACTLKPECVQQLLVCSQEAKKSAYCPYSHFPVGAALLTQEGRIFKGCNIE |
| linker_Ab68_ | NACYPLGICAERTAIQKAVSEGYKDFRAIAIASDMQDDFISPCGACRQVMREFGTN |
| HC_(G4S)3_ | WPVYMTKPDGTYIVMTVQELLPSSFGPEDLQKTQGGGGSGGGGSGGGGSGGGGS |
| LC | GGGGSGGGGSGGGGSGGGGSGGGGSGGGGSGGGGSGGGGSEVQLVESGGGLVQ |
| | PGRSLRLSCTASGFTFSDHDMNWVRQAPGKGLEWVGRTRNAAGSYTTEYAASVK |
| | GRFTISRDDSKNSLYLQMNSLKTEDTAVYYCAREPKYWIDFDLWGRGTLVTSSGG |
| | GGSGGGGSGGGGSDIQMTQSPSSLSASVGDRVTITCRASQSISSYLNWYQQKPGKA |
| | PKLLIYAASSLQSGVPSRFSGSGSGTDFTLTISSLQPEDFATYYCQQSYIAPYTFGGG |
| | TKVEIK (SEQ ID NO: 439) |
| CDA_(G4S)112 | MAQKRPACTLKPECVQQLLVCSQEAKKSAYCPYSHFPVGAALLTQEGRIFKGCNIE |
| linker_Ab69_ | NACYPLGICAERTAIQKAVSEGYKDFRAIAIASDMQDDFISPCGACRQVMREFGTN |
| HC_(G4S)3_ | WPVYMTKPDGTYIVMTVQELLPSSFGPEDLQKTQGGGGSGGGGSGGGGSGGGGS |
| LC | GGGGSGGGGSGGGGSGGGGGGGGSGGGGSGGGGSGGGGSDIQMTQSPSSLSAS |
| | VGDRVTITCRASQSISSYLNWYQQKPGKAPKLLIYAASSLQSGVPSRFSGSGSGTDF |
| | TLTISSLQPEDFATYYCQQSYIAPYIFGGGTKVEIKGGGGSGGGGSGGGGSEVQLVE |
| | SGGGLVQPGGSLRLSCAASGETFVDHDMDWVRQAPGKGLEWVGRTRNKLGSYTT |
| | EYAASVKGRETGRDDSKNSLYLQMNSLKTEDTAVYYCAREPKYWIDFDLWGRGT |
| | LVTVSS (SEQ ID NO: 440) |

[0341] All of the methods disclosed and claimed herein can be made and executed without undue experimentation in light of the present disclosure. While the compositions and methods of this invention have been described in terms of preferred embodiments, it will be apparent to those of skill in the art that variations may be applied to the methods and in the steps or in the sequence of steps of the method described herein without departing from the concept, spirit and scope of the invention. More specifically, it will be apparent that certain agents which are both chemically and physiologically related may be substituted for the agents described herein while the same or similar results would be achieved. All such similar substitutes and modifications apparent to those skilled in the art are deemed to be within the spirit, scope and concept of the invention as defined by the appended claims. The publications listed in the application, to the extent that they provide exemplary procedural or other details supplementary to those set forth herein, are specifically incorporated herein by reference.

What is claimed is:

1. A composition comprising an antigen-binding protein conjugated to a protection molecule, wherein the protection molecule comprises a molecule capable of neutralizing a cytotoxic agent.

2. The composition of claim 1, wherein the antigen-binding protein is an antibody or functional fragment thereof.

3. The composition of claim 1 or 2, wherein the antigen-binding protein is capable of binding to an antigen expressed on a healthy cell.

4. The composition of claim 3, wherein the healthy cell is a rapidly dividing healthy cell.

5. The composition of claim 3 or 4, wherein the healthy cell is a gastrointestinal cell, a bone marrow cell, an endothelial cell, a progenitor cell, a dermal cell, a cardiac cell, a liver cell, a kidney cell, a lung cell, an immune cell, a nervous system cell, and/or a mucosal cell.

6. The composition of any one of claims 1-5, wherein the antigen-binding protein is capable of binding to CD34.

7. The composition of any one of claims 1-5, wherein the antigen-binding protein is not capable of binding to CD34.

8. The composition of any one of claims 1-5, wherein the antigen-binding protein is capable of binding to CD117.

9. The composition of any one of claims 1-5, wherein the antigen-binding protein is not capable of binding to CD117.

10. The composition of any one of claims 1-5, wherein the antigen-binding protein comprises a heavy chain amino acid sequence provided in Table 1 and a light chain amino acid sequence provided in Table 1, or a functional fragment thereof.

11. The composition of any one of claims 1-10, wherein the antigen-binding protein and/or protein molecule comprises a purification tag.

12. The composition of claim 11, wherein the purification tag comprises a 6×Histidine tag.

13. The composition of claim 11 or 12, wherein the purification tag comprises a protease cleavage sequence.

14. The composition of any one of claims 1-13, wherein the antigen-binding protein does not comprise an Fc region.

15. The composition of any one of claims 1-14, wherein protection molecule comprises an enzyme.

16. The composition of any one of claims 1-15, wherein the protection molecule comprises a cytidine deaminase.

17. The composition of claim 16, wherein the cytidine deaminase is a human cytidine deaminase.

18. The composition of claim 16 or 17, wherein the cytidine deaminase comprises the amino acid sequence provided in Table 3.

19. The composition of any one of claims 1-18, wherein the cytotoxic agent comprises an anti-cancer agent.

20. The composition of any one of claims 1-19, wherein the cytotoxic agent comprises an alkylating agent, an antimetabolite, a nucleotide analog, a taxane, a platinum-based agent, and/or an antibiotic.

21. The composition of any one of claims 1-20, wherein the cytotoxic agent comprises gemcitabine.

22. The composition of any one of claims 1-21, wherein the antigen-binding protein and protection molecule are conjugated through click chemistry.

23. The composition of claim 22, wherein the click chemistry is copper-free click chemistry.

24. The composition of any one of claims 1-23, wherein the protection molecule is conjugated to a primary amine on the antigen-binding protein.

25. The composition of any one of claims 1-21, wherein the antigen-binding protein and protection molecule are conjugated as a recombinant protein.

26. The composition of any one of claims 1-21, wherein the antigen-binding protein and protection molecule are conjugated by cognate affinity-binding molecules.

27. The composition of 26, wherein the cognate affinity-binding molecules comprise biotin and streptavidin and/or biotin and avidin.

28. The composition of 26, wherein the cognate affinity-binding molecules comprise a SpyTag and SpyCatcher.

29. The composition of any one of claims 1-28, wherein the antigen-binding protein is cleavable from the protection molecule.

30. The composition of any one of claims 1-29, wherein the protection molecule is conjugated to the N-terminus and/or C-terminus of the antigen-binding protein.

31. The composition of any one of claims 1-30, wherein the composition also comprises the cytotoxic agent.

32. The composition of claim 31, wherein the composition comprises an amount of the cytotoxic agent greater than an amount within the cytotoxic agent's therapeutic window.

33. A protein comprising a heavy chain amino acid sequence provided in Table 1, a light chain amino acid sequence provided in Table 1, and a cytidine deaminase sequence provided in Table 3.

34. The protein of claim 33, further comprising a linker amino acid sequence provided in Table 2 and/or a His tag provided in Table 4.

35. A CD117-binding protein-cytidine deaminase conjugate comprising an amino acid sequence provided in Table 5.

36. A method of treating a patient that has, or will receive, a cytotoxic agent, the method comprising administering an antigen-binding protein conjugated to a protection molecule, wherein the protection molecule comprises a molecule capable of neutralizing the cytotoxic agent.

37. The method of claim 36, wherein the antigen-binding protein is an antibody or functional fragment thereof.

38. The method of claim 36 or 37, wherein the antigen-binding protein is capable of binding to an antigen expressed on a healthy cell.

39. The method of claim 38, wherein the healthy cell is a rapidly dividing healthy cell.

40. The method of claim 38 or 39, wherein the healthy cell is a gastrointestinal cell, a bone marrow cell, an endothelial cell, a progenitor cell, a dermal cell, a cardiac cell, a liver cell, a kidney cell, a lung cell, an immune cell, a nervous system cell, and/or a mucosal cell.

41. The method of any one of claims 36-40, wherein the antigen-binding protein is capable of binding to CD34.

42. The method of any one of claims 36-40, wherein the antigen-binding protein is not capable of binding to CD34.

43. The method of any one of claims 36-40, wherein the antigen-binding protein is capable of binding to CD117.

44. The method of any one of claims 36-40, wherein the antigen-binding protein is not capable of binding to CD117.

45. The method of any one of claims 36-40, wherein the antigen-binding protein comprises a heavy chain amino acid sequence provided in Table 1 and a light chain amino acid sequence provided in Table 1, or a functional fragment thereof.

46. The method of any one of claims 36-45, wherein the antigen-binding protein and/or protein molecule comprises a purification tag.

47. The method of claim 46, wherein the purification tag comprises a 6×Histidine tag.

48. The method of claim 46 or 47, wherein the purification tag comprises a protease cleavage sequence.

49. The method of any one of claims 36-48, wherein the antigen-binding protein does not comprise an Fc region.

50. The method of any one of claims 36-49, wherein the protection molecule comprises an enzyme.

51. The method of any one of claims 36-50, wherein the protection molecule comprises a cytidine deaminase.

52. The method of claim 51, wherein the cytidine deaminase is a human cytidine deaminase.

53. The composition of claim 51 or 52, wherein the cytidine deaminase comprises the amino acid sequence provided in Table 3.

54. The method of any one of claims 36-53, wherein the cytotoxic agent comprises an anti-cancer agent.

55. The method of any one of claims 36-54, wherein the cytotoxic agent comprises an alkylating agent, an antimetabolite, a nucleotide analog, a taxane, a platinum-based agent, and/or an antibiotic.

56. The method of any one of claims 36-55, wherein the cytotoxic agent comprises gemcitabine.

57. The method of any one of claims 36-56, wherein the antigen-binding protein and protection molecule are conjugated through click chemistry.

58. The method of claim 57, wherein the click chemistry is copper-free click chemistry.

59. The method of any one of claims 36-58, wherein the protection molecule is conjugated to a primary amine on the antigen-binding protein.

60. The method of any one of claims 36-56, wherein the antigen-binding protein and protection molecule are conjugated as a recombinant protein.

61. The method of any one of claims 36-56, wherein the antigen-binding protein and protection molecule are conjugated by cognate affinity-binding molecules.

62. The method of 61, wherein the cognate affinity-binding molecules comprise biotin and streptavidin and/or biotin and avidin.

63. The method of 61, wherein the cognate affinity-binding molecules comprise a Spy Tag and SpyCatcher.

64. The method of any one of claims 36-63, wherein the antigen-binding protein is cleavable from the protection molecule.

65. The method of any one of claims 36-64, wherein the protection molecule is conjugated to the N-terminus and/or C-terminus of the antigen-binding protein.

66. The method of any one of claims 36-65, wherein the patient received, or will receive, an amount of the cytotoxic agent that is greater than an amount in the cytotoxic agent's therapeutic window.

67. The method of any one of claims 36-66, wherein the patient is administered the antigen-binding protein prior to receiving the cytotoxic agent.

68. The method of any one of claims 36-67, wherein the patient is administered the antigen-binding protein concurrently with or in the same composition as the cytotoxic agent.

69. The method of any one of claims 36-68, wherein the patient is administered the antigen-binding protein subsequent to receiving the cytotoxic agent.

70. The method of any one of claims 36-69, wherein the patient has, has been diagnosed with, has one or more symptoms of, or is suspected of having a disease indicated for the cytotoxic agent.

71. The method of any one of claims 36-70, wherein the patient has, has been diagnosed with, has one or more symptoms of, or is suspected of having a cancer, an infection, or an autoimmune disease.

72. The method of any one of claims 36-71, wherein the patient has had an adverse reaction to the cytotoxic agent.

73. The method of any one of claims 36-72, wherein the patient is indicated to receive the cytotoxic agent.

74. The method of any one of claims 36-73, wherein the antigen-binding protein is administered by injection.

75. The method of any one of claims 36-74, wherein the antigen-binding protein is administered intravenously.

76. A method of reducing one or more side effects of a cytotoxic agent, the method comprising administering to a patient an antigen-binding protein conjugated to a protection molecule, wherein the protection molecule comprises a molecule capable of neutralizing the cytotoxic agent.

77. The method of claim 76, wherein the antigen-binding protein is an antibody or functional fragment thereof.

78. The method of claim 76 or 77, wherein the antigen-binding protein is capable of binding to an antigen expressed on a healthy cell.

79. The method of claim 78, wherein the healthy cell is a rapidly dividing healthy cell.

80. The method of claim 78 or 79, wherein the healthy cell is a gastrointestinal cell, a bone marrow cell, an endothelial cell, a progenitor cell, a dermal cell, a cardiac cell, a liver cell, a kidney cell, a lung cell, an immune cell, a nervous system cell, and/or a mucosal cell.

81. The method of any one of claims 76-80, wherein the antigen-binding protein is capable of binding to CD34.

82. The method of any one of claims 76-80, wherein the antigen-binding protein is not capable of binding to CD34.

83. The method of any one of claims 76-80, wherein the antigen-binding protein is capable of binding to CD117.

84. The method of any one of claims 76-80, wherein the antigen-binding protein is not capable of binding to CD117.

85. The method of any one of claims 76-80, wherein the antigen-binding protein comprises a heavy chain amino acid sequence provided in Table 1 and a light chain amino acid sequence provided in Table 1, or a functional fragment thereof.

86. The method of any one of claims 76-85, wherein the antigen-binding protein comprises a purification tag.

87. The method of claim 86, wherein the purification tag comprises a 6×Histidine tag.

88. The method of claim 86 or 87, wherein the purification tag comprises a protease cleavage sequence.

89. The method of any one of claims 76-88, wherein the antigen-binding protein does not comprise an Fc region.

90. The method of any one of claims 76-89, wherein protection molecule comprises an enzyme.

91. The method of any one of claims 76-90, wherein the protection molecule comprises a cytidine deaminase.

92. The method of claim 91, wherein the cytidine deaminase is a human cytidine deaminase.

93. The composition of claim 91 or 92, wherein the cytidine deaminase comprises the amino acid sequence provided in Table 3.

94. The method of any one of claims 76-93, wherein the cytotoxic agent comprises an anti-cancer agent.

95. The method of any one of claims 76-94, wherein the cytotoxic agent comprises an alkylating agent, an antimetabolite, a nucleotide analog, a taxane, a platinum-based agent, and/or an antibiotic.

96. The method of any one of claims 76-95, wherein the cytotoxic agent comprises gemcitabine.

97. The method of any one of claims 76-96, wherein the antigen-binding protein and protection molecule are conjugated through click chemistry.

98. The method of claim 97, wherein the click chemistry is copper-free click chemistry.

99. The method of any one of claims 76-98, wherein the protection molecule is conjugated to a primary amine on the antigen-binding protein.

100. The method of any one of claims 76-96, wherein the antigen-binding protein and protection molecule are conjugated as a recombinant protein.

101. The method of any one of claims 76-96, wherein the antigen-binding protein and protection molecule are conjugated by cognate affinity-binding molecules.

102. The method of 101, wherein the cognate affinity-binding molecules comprise biotin and streptavidin and/or biotin and avidin.

103. The method of 101, wherein the cognate affinity-binding molecules comprise a Spy Tag and SpyCatcher.

104. The method of any one of claims 76-103, wherein the antigen-binding protein is cleavable from the protection molecule.

105. The method of any one of claims 76-104, wherein the protection molecule is conjugated to the N-terminus and/or C-terminus of the antigen-binding protein.

106. The method of any one of claims 76-105, wherein the patient received, or will receive, an amount of the cytotoxic agent that is greater than an amount in the cytotoxic agent's therapeutic window.

107. The method of any one of claims 76-106, wherein the patient is administered the antigen-binding protein prior to receiving the cytotoxic agent.

108. The method of any one of claims 76-107, wherein the patient is administered the antigen-binding protein concurrently with or in the same composition as the cytotoxic agent.

109. The method of any one of claims 76-108, wherein the patient is administered the antigen-binding protein subsequent to receiving the cytotoxic agent.

110. The method of any one of claims 76-109, wherein the patient has, has been diagnosed with, has one or more symptoms of, or is suspected of having a disease indicated for the cytotoxic agent.

111. The method of any one of claims 76-110, wherein the patient has, has been diagnosed with, has one or more symptoms of, or is suspected of having a cancer, an infection, or an autoimmune disease.

112. The method of any one of claims 76-111, wherein the patient has had an adverse reaction to the cytotoxic agent.

113. The method of any one of claims 76-112, wherein the patient is indicate to receive the cytotoxic agent.

114. The method of any one of claims 76-113, wherein the antigen-binding protein is administered by injection.

115. The method of any one of claims 76-114, wherein the antigen-binding protein is administered intravenously.

116. The method of any one of claims 76-115, wherein the side effects comprise neutropenia, anemia, thrombocytopenia, lymphopenia, or a combination thereof.

117. The method of any one of claims 76-116, wherein the side effects occur or are worsened when the patient receives the cytotoxic agent at a dosage above the therapeutic window of the cytotoxic agent.

The application's sequence listing, which the Patent Office published only in electronic form, follows.

SEQUENCE LISTING (926 sequences)

SEQ ID NO: 1 - protein, 403 aa, synthetic construct
DIQMTQSPSSVSASVGDRVTITCRASQGISSWLAWYQQKPGKAPKLLLIYAASSLQSGVPSRFSGSGSGTDFTLTISSLQPEDFATYYCQQTNSFPYTFGGGTKVEIKGGGGSGGGGSGGGGSEVQLLESGGGLVQPGGSLRLSCAASGETFSNYAMSWVRQAPGKGLEWVSAISGSGGSTYYADSVKGRFTISRDNSKNTLYLQMNSLRAEDTAVYYCAKGPPTYHTNYYYMDVWGKGTTVTVSSGGGGSMAQKRPACTLKPECVQQLLVCSQEAKKSAYCPYSHFPVGAALLTQEGRIFKGCNIENACYPLGICAERTAIQKAVSEGYKDFRAIAIASDMQDDFISPCGACRQVMREFGTNWPVYMTKPDGTYIVMTVQELLPSSFGPEDLQKTQHHHHHH

SEQ ID NO: 2 - protein, 413 aa, synthetic construct
DIQMTQSPSSVSASVGDRVTITCRASQGISSWLAWYQQKPGKAPKLLLIYAASSLQSGVPSRFSGSGSGTDFTLTISSLQPEDFATYYCQQTNSFPYTFGGGTKVEIKGGGGSGGGGSGGGGSEVQLLESGGGLVQPGGSLRLSCAASGETFSNYAMSWVRQAPGKGLEWVSAISGSGGSTYYADSVKGRFTISRDNSKNTLYLQMNSLRAEDTAVYYCAKGPPTYHTNYYYMDVWGKGTTVTVSSGGGGSGGGGSGGGGSMAQKRPACTLKPECVQQLLVCSQEAKKSAYCPYSHFPVGAALLTQEGRIFKGCNIENACYPLGICAERTAIQKAVSEGYKDFRAIAIASDMQDDFISPCGACRQVMREFGTNWPVYMTKPDGTYIVMTVQELLPSSFGPEDLQKTQHHHHHH

SEQ ID NO: 3 - protein, 418 aa, synthetic construct
DIQMTQSPSSVSASVGDRVTITCRASQGISSWLAWYQQKPGKAPKLLLIYAASSLQSGVPSRFSGSGSGTDFTLTISSLQPEDFATYYCQQTNSFPYTFGGGTKVEIKGGGGSGGGGSGGGGSEVQLLESGGGLVQPGGSLRLSCAASGETFSNYAMSWVRQAPGKGLEWVSAISGSGGSTYYADSVKGRFTISRDNSKNTLYLQMNSLRAEDTAVYYCAKGPPTYHTNYYYMDVWGKGTTVTVSSGGGGSGGGGSGGGGSGGGGSMAQKRPACTLKPECVQQLLVCSQEAKKSAYCPYSHFPVGAALLTQEGRIFKGCNIENACYPLGICAERTAIQKAVSEGYKDFRAIAIASDMQDDFISPCGACRQVMREFGTNWPVYMTKPDGTYIVMTVQELLPSSFGPEDLQKTQHHHHHH

SEQ ID NO: 4 - protein, 423 aa, synthetic construct
DIQMTQSPSSVSASVGDRVTITCRASQGISSWLAWYQQKPGKAPKLLLIYAASSLQSGVPSRFSGSGSGTDFTLTISSLQPEDFATYYCQQTNSFPYTFGGGTKVEIKGGGGSGGGGSGGGGSEVQLLESGGGLVQPGGSLRLSCAASGETFSNYAMSWVRQAPGKGLEWVSAISGSGGSTYYADSVKGRFTISRDNSKNTLYLQMNSLRAEDTAVYYCAKGPPTYHTNYYYMDVWGKGTTVTVSSGGGGSGGGGSGGGGSGGGGSGGGGSMAQKRPACTLKPECVQQLLVCSQEAKKSAYCPYSHFPVGAALLTQEGRIFKGCNIENACYPLGICAERTAIQKAVSEGYKDFRAIAIASDMQDDFISPCGACRQVMREFGTNWPVYMTKPDGTYIVMTVQELLPSSFGPEDLQKTQHHHHHH

SEQ ID NO: 5 - protein, 428 aa, synthetic construct
DIQMTQSPSSVSASVGDRVTITCRASQGISSWLAWYQQKPGKAPKLLLIYAASSLQSGVPSRFSGSGSGTDFTLTISSLQPEDFATYYCQQTNSFPYTFGGGTKVEIKGGGGSGGGGSGGGGSEVQLLESGGGLVQPGGSLRLSCAASGETFSNYAMSWVRQAPGKGLEWVSAISGSGGSTYYADSVKGRFTISRDNSKNTLYLQMNSLRAEDTAVYYCAKGPPTYHTNYYYMDVWGKGTTVTVSSGGGGSGGGGSGGGGSGGGGSGGGGSGGGGSMAQKRPACTLKPECVQQLLVCSQEAKKSAYCPYSHFPVGAALLTQEGRIFKGCNIENACYPLGICAERTAIQKAVSEGYKDFRAIAIASDMQDDFISPCGACRQVMREFGTNWPVYMTKPDGTYIVMTVQELLPSSFGPEDLQKTQHHHHHH

SEQ ID NO: 6 - protein, 433 aa, synthetic construct
DIQMTQSPSSVSASVGDRVTITCRASQGISSWLAWYQQKPGKAPKLLLIYAASSLQSGVPSRFSGSGSGTDFTLTISSLQPEDFATYYCQQTNSFPYTFGGGTKVEIKGGGGSGGGGSGGGGSEVQLLESGGGLVQPGGSLRLSCAASGETFSNYAMSWVRQAPGKGLEWVSAISGSGGSTYYADSVKGRFTISRDNSKNTLYLQMNSLRAEDTAVYYCAKGPPTYHTNYYYMDVWGKGTTVTVSSGGGGSGGGGSGGGGSGGGGSGGGGSGGGGSGGGGSMAQKRPACTLKPECVQQLLVCSQEAKKSAYCPYSHFPVGAALLTQEGRIFKGCNIENACYPLGICAERTAIQKAVSEGYKDFRAIAIASDMQDDFISPCGACRQVMREFGTNWPVYMTKPDGTYIVMTVQELLPSSFGPEDLQKTQHHHHHH

SEQ ID NO: 7 - protein, 438 aa, synthetic construct
DIQMTQSPSSVSASVGDRVTITCRASQGISSWLAWYQQKPGKAPKLLLIYAASSLQSGVPSRFSGSGSGTDFTLTISSLQPEDFATYYCQQTNSFPYTFGGGTKVEIKGGGGSGGGGSGGGGSEVQLLESGGGLVQPGGSLRLSCAASGETFSNYAMSWVRQAPGKGLEWVSAISGSGGSTYYADSVKGRFTISRDNSKNTLYLQMNSLRAEDTAVYYCAKGPPTYHTNYYYMDVWGKGTTVTVSSGGGGSGGGGSGGGGSGGGGSGGGGSGGGGSGGGGSGGGGSMAQKRPACTLKPECVQQLLVCSQEAKKSAYCPYSHFPVGAALLTQEGRIFKGCNIENACYPLGICAERTAIQKAVSEGYKDFRAIAIASDMQDDFISPCGACRQVMREFGTNWPVYMTKPDGTYIVMTVQELLPSSFGPEDLQKTQHHHHHH

SEQ ID NO: 8 - protein, 443 aa, synthetic construct
DIQMTQSPSSVSASVGDRVTITCRASQGISSWLAWYQQKPGKAPKLLLIYAASSLQSGVPSRFSGSGSGTDFTLTISSLQPEDFATYYCQQTNSFPYTFGGGTKVEIKGGGGSGGGGSGGGGSEVQLLESGGGLVQPGGSLRLSCAASGETFSNYAMSWVRQAPGKGLEWVSAISGSGGSTYYADSVKGRFTISRDNSKNTLYLQMNSLRAEDTAVYYCAKGPPTYHTNYYYMDVWGKGTTVTVSSGGGGSGGGGSGGGGSGGGGSGGGGSGGGGSGGGGSGGGGSGGGGSMAQKRPACTLKPECVQQLLVCSQEAKKSAYCPYSHFPVGAALLTQEGRIFKGCNIENACYPLGICAERTAIQKAVSEGYKDFRAIAIASDMQDDFISPCGACRQVMREFGTNWPVYMTKPDGTYIVMTVQELLPSSFGPEDLQKTQHHHHHH

SEQ ID NO: 9 - protein, 448 aa, synthetic construct
DIQMTQSPSSVSASVGDRVTITCRASQGISSWLAWYQQKPGKAPKLLLIYAASSLQSGVPSRFSGSGSGTDFTLTISSLQPEDFATYYCQQTNSFPYTFGGGTKVEIKGGGGSGGGGSGGGGSEVQLLESGGGLVQPGGSLRLSCAASGETFSNYAMSWVRQAPGKGLEWVSAISGSGGSTYYADSVKGRFTISRDNSKNTLYLQMNSLRAEDTAVYYCAKGPPTYHTNYYYMDVWGKGTTVTVSSGGGGSGGGGSGGGGSGGGGSGGGGSGGGGSGGGGSGGGGSGGGGSGGGGSMAQKRPACTLKPECVQQLLVCSQEAKKSAYCPYSHFPVGAALLTQEGRIFKGCNIENACYPLGICAERTAIQKAVSEGYKDFRAIAIASDMQDDFISPCGACRQVMREFGTNWPVYMTKPDGTYIVMTVQELLPSSFGPEDLQKTQHHHHHH

SEQ ID NO: 10 - protein, 453 aa, synthetic construct
DIQMTQSPSSVSASVGDRVTITCRASQGISSWLAWYQQKPGKAPKLLLIYAASSLQSGVPSRFSGSGSGTDFTLTISSLQPEDFATYYCQQTNSFPYTFGGGTKVEIKGGGGSGGGGSGGGGSEVQLLESGGGLVQPGGSLRLSCAASGETFSNYAMSWVRQAPGKGLEWVSAISGSGGSTYYADSVKGRFTISRDNSKNTLYLQMNSLRAEDTAVYYCAKGPPTYHTNYYYMDVWGKGTTVTVSSGGGGSGGGGSGGGGSGGGGSGGGGSGGGGSGGGGSGGGGSGGGGSGGGGSGGGGSMAQKRPACTLKPECVQQLLVCSQEAKKSAYCPYSHFPVGAALLTQEGRIFKGCNIENACYPLGICAERTAIQKAVSEGYKDFRAIAIASDMQDDFISPCGACRQVMREFGTNWPVYMTKPDGTYIVMTVQELLPSSFGPEDLQKTQHHHHHH

SEQ ID NO: 11 - protein, 458 aa, synthetic construct
DIQMTQSPSSVSASVGDRVTITCRASQGISSWLAWYQQKPGKAPKLLLIYAASSLQSGVPSRFSGSGSGTDFTLTISSLQPEDFATYYCQQTNSFPYTFGGGTKVEIKGGGGSGGGGSGGGGSEVQLLESGGGLVQPGGSLRLSCAASGETFSNYAMSWVRQAPGKGLEWVSAISGSGGSTYYADSVKGRFTISRDNSKNTLYLQMNSLRAEDTAVYYCAKGPPTYHTNYYYMDVWGKGTTVTVSSGGGGSGGGGSGGGGSGGGGSGGGGSGGGGSGGGGSGGGGSGGGGSGGGGSGGGGSGGGGSMAQKRPACTLKPECVQQLLVCSQEAKKSAYCPYSHFPVGAALLTQEGRIFKGCNIENACYPLGICAERTAIQKAVSEGYKDFRAIAIASDMQDDFISPCGACRQVMREFGTNWPVYMTKPDGTYIVMTVQELLPSSFGPEDLQKTQHHHHHH

SEQ ID NO: 12 - protein, 403 aa, synthetic construct
DIQMTQSPSSVSASVGDRVTITCRASQGISSWLAWYQQKPGKAPKLLIYAASSLOQSGVPSRFSGSGSGTDFTLTISSLQPEDFATYYCQQTNSEPYTFGGGTKVEIKGGGGSGGGGSGGGGSEVQLLESGGGLVQPGGSLRLSCAASGETESSYVMIWVRQAPGKGLEWVSSISGDSVTTYYADSVKGRFTISRDNSKNTLYLOMNSLRAEDTAVYYCAKGPPTYHTNYYYMDVWGKGTTVTVSSGGGGSMAQKRPACTLKPECVQQLLVCSQEAKKSAYCPYSHFPVGAALLTQEGRIFKGCNIENACYPLGICAERTAIQKAVSEGYKDFRAIAIASDMQDDFISPCGACRQVMREFGTNWPVYMTKPDGTYIVMTVQELLPSSFGPEDLQKTQHHHHHH

SEQ ID NO: 13 - protein, 413 aa, synthetic construct
DIQMTQSPSSVSASVGDRVTITCRASQGISSWLAWYQQKPGKAPKLLIYAASSLOQSGVPSRFSGSGSGTDFTLTISSLQPEDFATYYCQQTNSEPYTFGGGTKVEIKGGGGSGGGGSGGGGSEVQLLESGGGLVQPGGSLRLSCAASGETESSYVMIWVRQAPGKGLEWVSSISGDSVTTYYADSVKGRFTISRDNSKNTLYLOMNSLRAEDTAVYYCAKGPPTYHTNYYYMDVWGKGTTVTVSSGGGGSGGGGSGGGGSMAQKRPACTLKPECVQQLLVCSQEAKKSAYCPYSHFPVGAALLTQEGRIFKGCNIENACYPLGICAERTAIQKAVSEGYKDFRAIAIASDMQDDFISPCGACRQVMREFGTNWPVYMTKPDGTYIVMTVQELLPSSFGPEDLQKTQHHHHHH

SEQ ID NO: 14 - protein, 418 aa, synthetic construct
DIQMTQSPSSVSASVGDRVTITCRASQGISSWLAWYQQKPGKAPKLLIYAASSLOQSGVPSRFSGSGSGTDFTLTISSLQPEDFATYYCQQTNSEPYTFGGGTKVEIKGGGGSGGGGSGGGGSEVQLLESGGGLVQPGGSLRLSCAASGETESSYVMIWVRQAPGKGLEWVSSISGDSVTTYYADSVKGRFTISRDNSKNTLYLOMNSLRAEDTAVYYCAKGPPTYHTNYYYMDVWGKGTTVTVSSGGGGSGGGGSGGGGSGGGGSMAQKRPACTLKPECVQQLLVCSQEAKKSAYCPYSHFPVGAALLTQEGRIFKGCNIENACYPLGICAERTAIQKAVSEGYKDFRAIAIASDMQDDFISPCGACRQVMREFGTNWPVYMTKPDGTYIVMTVQELLPSSFGPEDLQKTQHHHHHH

SEQ ID NO: 15 - protein, 423 aa, synthetic construct
DIQMTQSPSSVSASVGDRVTITCRASQGISSWLAWYQQKPGKAPKLLIYAASSLOQSGVPSRFSGSGSGTDFTLTISSLQPEDFATYYCQQTNSEPYTFGGGTKVEIKGGGGSGGGGSGGGGSEVQLLESGGGLVQPGGSLRLSCAASGETESSYVMIWVRQAPGKGLEWVSSISGDSVTTYYADSVKGRFTISRDNSKNTLYLOMNSLRAEDTAVYYCAKGPPTYHTNYYYMDVWGKGTTVTVSSGGGGSGGGGSGGGGSGGGGSGGGGSMAQKRPACTLKPECVQQLLVCSQEAKKSAYCPYSHFPVGAALLTQEGRIFKGCNIENACYPLGICAERTAIQKAVSEGYKDFRAIAIASDMQDDFISPCGACRQVMREFGTNWPVYMTKPDGTYIVMTVQELLPSSFGPEDLQKTQHHHHHH

SEQ ID NO: 16 - protein, 428 aa, synthetic construct
DIQMTQSPSSVSASVGDRVTITCRASQGISSWLAWYQQKPGKAPKLLIYAASSLOQSGVPSRFSGSGSGTDFTLTISSLQPEDFATYYCQQTNSEPYTFGGGTKVEIKGGGGSGGGGSGGGGSEVQLLESGGGLVQPGGSLRLSCAASGETESSYVMIWVRQAPGKGLEWVSSISGDSVTTYYADSVKGRFTISRDNSKNTLYLOMNSLRAEDTAVYYCAKGPPTYHTNYYYMDVWGKGTTVTVSSGGGGSGGGGSGGGGSGGGGSGGGGSGGGGSMAQKRPACTLKPECVQQLLVCSQEAKKSAYCPYSHFPVGAALLTQEGRIFKGCNIENACYPLGICAERTAIQKAVSEGYKDFRAIAIASDMQDDFISPCGACRQVMREFGTNWPVYMTKPDGTYIVMTVQELLPSSFGPEDLQKTQHHHHHH

SEQ ID NO: 17 - protein, 433 aa, synthetic construct
DIQMTQSPSSVSASVGDRVTITCRASQGISSWLAWYQQKPGKAPKLLIYAASSLOQSGVPSRFSGSGSGTDFTLTISSLQPEDFATYYCQQTNSEPYTFGGGTKVEIKGGGGSGGGGSGGGGSEVQLLESGGGLVQPGGSLRLSCAASGETESSYVMIWVRQAPGKGLEWVSSISGDSVTTYYADSVKGRFTISRDNSKNTLYLOMNSLRAEDTAVYYCAKGPPTYHTNYYYMDVWGKGTTVTVSSGGGGSGGGGSGGGGSGGGGSGGGGSGGGGSGGGGSMAQKRPACTLKPECVQQLLVCSQEAKKSAYCPYSHFPVGAALLTQEGRIFKGCNIENACYPLGICAERTAIQKAVSEGYKDFRAIAIASDMQDDFISPCGACRQVMREFGTNWPVYMTKPDGTYIVMTVQELLPSSFGPEDLQKTQHHHHHH

SEQ ID NO: 18 - protein, 438 aa, synthetic construct
DIQMTQSPSSVSASVGDRVTITCRASQGISSWLAWYQQKPGKAPKLLIYAASSLOQSGVPSRFSGSGSGTDFTLTISSLQPEDFATYYCQQTNSEPYTFGGGTKVEIKGGGGSGGGGSGGGGSEVQLLESGGGLVQPGGSLRLSCAASGETESSYVMIWVRQAPGKGLEWVSSISGDSVTTYYADSVKGRFTISRDNSKNTLYLOMNSLRAEDTAVYYCAKGPPTYHTNYYYMDVWGKGTTVTVSSGGGGSGGGGSGGGGSGGGGSGGGGSGGGGSGGGGSGGGGSMAQKRPACTLKPECVQQLLVCSQEAKKSAYCPYSHFPVGAALLTQEGRIFKGCNIENACYPLGICAERTAIQKAVSEGYKDFRAIAIASDMQDDFISPCGACRQVMREFGTNWPVYMTKPDGTYIVMTVQELLPSSFGPEDLQKTQHHHHHH

SEQ ID NO: 19 - protein, 443 aa, synthetic construct
DIQMTQSPSSVSASVGDRVTITCRASQGISSWLAWYQQKPGKAPKLLIYAASSLOQSGVPSRFSGSGSGTDFTLTISSLQPEDFATYYCQQTNSEPYTFGGGTKVEIKGGGGSGGGGSGGGGSEVQLLESGGGLVQPGGSLRLSCAASGETESSYVMIWVRQAPGKGLEWVSSISGDSVTTYYADSVKGRFTISRDNSKNTLYLOMNSLRAEDTAVYYCAKGPPTYHTNYYYMDVWGKGTTVTVSSGGGGSGGGGSGGGGSGGGGSGGGGSGGGGSGGGGSGGGGSGGGGSMAQKRPACTLKPECVQQLLVCSQEAKKSAYCPYSHFPVGAALLTQEGRIFKGCNIENACYPLGICAERTAIQKAVSEGYKDFRAIAIASDMQDDFISPCGACRQVMREFGTNWPVYMTKPDGTYIVMTVQELLPSSFGPEDLQKTQHHHHHH

SEQ ID NO: 20 - protein, 448 aa, synthetic construct
DIQMTQSPSSVSASVGDRVTITCRASQGISSWLAWYQQKPGKAPKLLIYAASSLOQSGVPSRFSGSGSGTDFTLTISSLQPEDFATYYCQQTNSEPYTFGGGTKVEIKGGGGSGGGGSGGGGSEVQLLESGGGLVQPGGSLRLSCAASGETESSYVMIWVRQAPGKGLEWVSSISGDSVTTYYADSVKGRFTISRDNSKNTLYLOMNSLRAEDTAVYYCAKGPPTYHTNYYYMDVWGKGTTVTVSSGGGGSGGGGSGGGGSGGGGSGGGGSGGGGSGGGGSGGGGSGGGGSGGGGSMAQKRPACTLKPECVQQLLVCSQEAKKSAYCPYSHFPVGAALLTQEGRIFKGCNIENACYPLGICAERTAIQKAVSEGYKDFRAIAIASDMQDDFISPCGACRQVMREFGTNWPVYMTKPDGTYIVMTVQELLPSSFGPEDLQKTQHHHHHH

SEQ ID NO: 21 - protein, 453 aa, synthetic construct
DIQMTQSPSSVSASVGDRVTITCRASQGISSWLAWYQQKPGKAPKLLIYAASSLOQSGVPSRFSGSGSGTDFTLTISSLQPEDFATYYCQQTNSEPYTFGGGTKVEIKGGGGSGGGGSGGGGSEVQLLESGGGLVQPGGSLRLSCAASGETESSYVMIWVRQAPGKGLEWVSSISGDSVTTYYADSVKGRFTISRDNSKNTLYLOMNSLRAEDTAVYYCAKGPPTYHTNYYYMDVWGKGTTVTVSSGGGGSGGGGSGGGGSGGGGSGGGGSGGGGSGGGGSGGGGSGGGGSGGGGSGGGGSMAQKRPACTLKPECVQQLLVCSQEAKKSAYCPYSHFPVGAALLTQEGRIFKGCNIENACYPLGICAERTAIQKAVSEGYKDFRAIAIASDMQDDFISPCGACRQVMREFGTNWPVYMTKPDGTYIVMTVQELLPSSFGPEDLQKTQHHHHHH

SEQ ID NO: 22 - protein, 458 aa, synthetic construct
DIQMTQSPSSVSASVGDRVTITCRASQGISSWLAWYQQKPGKAPKLLIYAASSLOQSGVPSRFSGSGSGTDFTLTISSLQPEDFATYYCQQTNSEPYTFGGGTKVEIKGGGGSGGGGSGGGGSEVQLLESGGGLVQPGGSLRLSCAASGETESSYVMIWVRQAPGKGLEWVSSISGDSVTTYYADSVKGRFTISRDNSKNTLYLOMNSLRAEDTAVYYCAKGPPTYHTNYYYMDVWGKGTTVTVSSGGGGSGGGGSGGGGSGGGGSGGGGSGGGGSGGGGSGGGGSGGGGSGGGGSGGGGSGGGGSMAQKRPACTLKPECVQQLLVCSQEAKKSAYCPYSHFPVGAALLTQEGRIFKGCNIENACYPLGICAERTAIQKAVSEGYKDFRAIAIASDMQDDFISPCGACRQVMREFGTNWPVYMTKPDGTYIVMTVQELLPSSFGPEDLQKTQHHHHHH

SEQ ID NO: 23 - protein, 422 aa, synthetic construct
DIQMTQSPSSLSASVGDRVTITCRASQSISSYLNWYQQKPGKAPKLLIYAASSLQSGVPSRFSGSGSGTDFTLTISSLQPEDFATYYCQQSYIAPYTFGGGTKVEIKGGGGSGGGGSGGGGSEVQLVESGGGLVQPGGSLRLSCAASGETFSDHYMDWVRQAPGKGLASGETFSDHYMDWVRQAPGKGLEWVGRIRNKASSYTTEYAASVKGRFTISRDDSKNSLYLQMNSLKTEDTAVYYCAREPKYWIDFDLWGRGTLVTVSSGGGGSMAQKRPACTLKPECVQQLLVCSQEAKKSAYCPYSHFPVGAALLTQEGRIFKGCNIENACYPLGICAERTAIQKAVSEGYKDFRAIAIASDMQDDFISPCGACRQVMREFGTNWPVYMTKPDGTYIVMTVQELLPSSFGPEDLQKTQHHHHHH

SEQ ID NO: 24 - protein, 432 aa, synthetic construct
DIQMTQSPSSLSASVGDRVTITCRASQSISSYLNWYQQKPGKAPKLLIYAASSLQSGVPSRFSGSGSGTDFTLTISSLQPEDFATYYCQQSYIAPYTFGGGTKVEIKGGGGSGGGGSGGGGSEVQLVESGGGLVQPGGSLRLSCAASGETFSDHYMDWVRQAPGKGLASGETFSDHYMDWVRQAPGKGLEWVGRIRNKASSYTTEYAASVKGRFTISRDDSKNSLYLQMNSLKTEDTAVYYCAREPKYWIDFDLWGRGTLVTVSSGGGGSGGGGSGGGGSMAQKRPACTLKPECVQQLLVCSQEAKKSAYCPYSHFPVGAALLTQEGRIFKGCNIENACYPLGICAERTAIQKAVSEGYKDFRAIAIASDMQDDFISPCGACRQVMREFGTNWPVYMTKPDGTYIVMTVQELLPSSFGPEDLQKTQHHHHHH

SEQ ID NO: 25 - protein, 437 aa, synthetic construct
DIQMTQSPSSLSASVGDRVTITCRASQSISSYLNWYQQKPGKAPKLLIYAASSLQSGVPSRFSGSGSGTDFTLTISSLQPEDFATYYCQQSYIAPYTFGGGTKVEIKGGGGSGGGGSGGGGSEVQLVESGGGLVQPGGSLRLSCAASGETFSDHYMDWVRQAPGKGLASGETFSDHYMDWVRQAPGKGLEWVGRIRNKASSYTTEYAASVKGRFTISRDDSKNSLYLQMNSLKTEDTAVYYCAREPKYWIDFDLWGRGTLVTVSSGGGGSGGGGSGGGGSGGGGSMAQKRPACTLKPECVQQLLVCSQEAKKSAYCPYSHFPVGAALLTQEGRIFKGCNIENACYPLGICAERTAIQKAVSEGYKDFRAIAIASDMQDDFISPCGACRQVMREFGTNWPVYMTKPDGTYIVMTVQELLPSSFGPEDLQKTQHHHHHH

SEQ ID NO: 26 - protein, 442 aa, synthetic construct
DIQMTQSPSSLSASVGDRVTITCRASQSISSYLNWYQQKPGKAPKLLIYAASSLQSGVPSRFSGSGSGTDFTLTISSLQPEDFATYYCQQSYIAPYTFGGGTKVEIKGGGGSGGGGSGGGGSEVQLVESGGGLVQPGGSLRLSCAASGETFSDHYMDWVRQAPGKGLASGETFSDHYMDWVRQAPGKGLEWVGRIRNKASSYTTEYAASVKGRFTISRDDSKNSLYLQMNSLKTEDTAVYYCAREPKYWIDFDLWGRGTLVTVSSGGGGSGGGGSGGGGSGGGGSGGGGSMAQKRPACTLKPECVQQLLVCSQEAKKSAYCPYSHFPVGAALLTQEGRIFKGCNIENACYPLGICAERTAIQKAVSEGYKDFRAIAIASDMQDDFISPCGACRQVMREFGTNWPVYMTKPDGTYIVMTVQELLPSSFGPEDLQKTQHHHHHH

SEQ ID NO: 27 - protein, 447 aa, synthetic construct
DIQMTQSPSSLSASVGDRVTITCRASQSISSYLNWYQQKPGKAPKLLIYAASSLQSGVPSRFSGSGSGTDFTLTISSLQPEDFATYYCQQSYIAPYTFGGGTKVEIKGGGGSGGGGSGGGGSEVQLVESGGGLVQPGGSLRLSCAASGETFSDHYMDWVRQAPGKGLASGETFSDHYMDWVRQAPGKGLEWVGRIRNKASSYTTEYAASVKGRFTISRDDSKNSLYLQMNSLKTEDTAVYYCAREPKYWIDFDLWGRGTLVTVSSGGGGSGGGGSGGGGSGGGGSGGGGSGGGGSMAQKRPACTLKPECVQQLLVCSQEAKKSAYCPYSHFPVGAALLTQEGRIFKGCNIENACYPLGICAERTAIQKAVSEGYKDFRAIAIASDMQDDFISPCGACRQVMREFGTNWPVYMTKPDGTYIVMTVQELLPSSFGPEDLQKTQHHHHHH

SEQ ID NO: 28 - protein, 452 aa, unidentified
DIQMTQSPSSLSASVGDRVTITCRASQSISSYLNWYQQKPGKAPKLLIYAASSLQSGVPSRFSGSGSGTDFTLTISSLQPEDFATYYCQQSYIAPYTFGGGTKVEIKGGGGSGGGGSGGGGSEVQLVESGGGLVQPGGSLRLSCAASGETFSDHYMDWVRQAPGKGLASGETFSDHYMDWVRQAPGKGLEWVGRIRNKASSYTTEYAASVKGRFTISRDDSKNSLYLQMNSLKTEDTAVYYCAREPKYWIDFDLWGRGTLVTVSSGGGGSGGGGSGGGGSGGGGSGGGGSGGGGSGGGGSMAQKRPACTLKPECVQQLLVCSQEAKKSAYCPYSHFPVGAALLTQEGRIFKGCNIENACYPLGICAERTAIQKAVSEGYKDFRAIAIASDMQDDFISPCGACRQVMREFGTNWPVYMTKPDGTYIVMTVQELLPSSFGPEDLQKTQHHHHHH

SEQ ID NO: 29 - protein, 457 aa, synthetic construct
DIQMTQSPSSLSASVGDRVTITCRASQSISSYLNWYQQKPGKAPKLLIYAASSLQSGVPSRFSGSGSGTDFTLTISSLQPEDFATYYCQQSYIAPYTFGGGTKVEIKGGGGSGGGGSGGGGSEVQLVESGGGLVQPGGSLRLSCAASGETFSDHYMDWVRQAPGKGLASGETFSDHYMDWVRQAPGKGLEWVGRIRNKASSYTTEYAASVKGRFTISRDDSKNSLYLQMNSLKTEDTAVYYCAREPKYWIDFDLWGRGTLVTVSSGGGGSGGGGSGGGGSGGGGSGGGGSGGGGSGGGGSGGGGSMAQKRPACTLKPECVQQLLVCSQEAKKSAYCPYSHFPVGAALLTQEGRIFKGCNIENACYPLGICAERTAIQKAVSEGYKDFRAIAIASDMQDDFISPCGACRQVMREFGTNWPVYMTKPDGTYIVMTVQELLPSSFGPEDLQKTQHHHHHH

SEQ ID NO: 30 - protein, 462 aa, synthetic construct
DIQMTQSPSSLSASVGDRVTITCRASQSISSYLNWYQQKPGKAPKLLIYAASSLQSGVPSRFSGSGSGTDFTLTISSLQPEDFATYYCQQSYIAPYTFGGGTKVEIKGGGGSGGGGSGGGGSEVQLVESGGGLVQPGGSLRLSCAASGETFSDHYMDWVRQAPGKGLASGETFSDHYMDWVRQAPGKGLEWVGRIRNKASSYTTEYAASVKGRFTISRDDSKNSLYLQMNSLKTEDTAVYYCAREPKYWIDFDLWGRGTLVTVSSGGGGSGGGGSGGGGSGGGGSGGGGSGGGGSGGGGSGGGGSGGGGSMAQKRPACTLKPECVQQLLVCSQEAKKSAYCPYSHFPVGAALLTQEGRIFKGCNIENACYPLGICAERTAIQKAVSEGYKDFRAIAIASDMQDDFISPCGACRQVMREFGTNWPVYMTKPDGTYIVMTVQELLPSSFGPEDLQKTQHHHHHH

SEQ ID NO: 31 - protein, 467 aa, synthetic construct
DIQMTQSPSSLSASVGDRVTITCRASQSISSYLNWYQQKPGKAPKLLIYAASSLQSGVPSRFSGSGSGTDFTLTISSLQPEDFATYYCQQSYIAPYTFGGGTKVEIKGGGGSGGGGSGGGGSEVQLVESGGGLVQPGGSLRLSCAASGETFSDHYMDWVRQAPGKGLASGETFSDHYMDWVRQAPGKGLEWVGRIRNKASSYTTEYAASVKGRFTISRDDSKNSLYLQMNSLKTEDTAVYYCAREPKYWIDFDLWGRGTLVTVSSGGGGSGGGGSGGGGSGGGGSGGGGSGGGGSGGGGSGGGGSGGGGSGGGGSMAQKRPACTLKPECVQQLLVCSQEAKKSAYCPYSHFPVGAALLTQEGRIFKGCNIENACYPLGICAERTAIQKAVSEGYKDFRAIAIASDMQDDFISPCGACRQVMREFGTNWPVYMTKPDGTYIVMTVQELLPSSFGPEDLQKTQHHHHHH

SEQ ID NO: 32 - protein, 472 aa, synthetic construct
DIQMTQSPSSLSASVGDRVTITCRASQSISSYLNWYQQKPGKAPKLLIYAASSLQSGVPSRFSGSGSGTDFTLTISSLQPEDFATYYCQQSYIAPYTFGGGTKVEIKGGGGSGGGGSGGGGSEVQLVESGGGLVQPGGSLRLSCAASGETFSDHYMDWVRQAPGKGLASGETFSDHYMDWVRQAPGKGLEWVGRIRNKASSYTTEYAASVKGRFTISRDDSKNSLYLQMNSLKTEDTAVYYCAREPKYWIDFDLWGRGTLVTVSSGGGGSGGGGSGGGGSGGGGSGGGGSGGGGSGGGGSGGGGSGGGGSGGGGSGGGGSMAQKRPACTLKPECVQQLLVCSQEAKKSAYCPYSHFPVGAALLTQEGRIFKGCNIENACYPLGICAERTAIQKAVSEGYKDFRAIAIASDMQDDFISPCGACRQVMREFGTNWPVYMTKPDGTYIVMTVQELLPSSFGPEDLQKTQHHHHHH

SEQ ID NO: 33 - protein, 477 aa, synthetic construct
DIQMTQSPSSLSASVGDRVTITCRASQSISSYLNWYQQKPGKAPKLLIYAASSLQSGVPSRFSGSGSGTDFTLTISSLQPEDFATYYCQQSYIAPYTFGGGTKVEIKGGGGSGGGGSGGGGSEVQLVESGGGLVQPGGSLRLSCAASGETFSDHYMDWVRQAPGKGLASGETFSDHYMDWVRQAPGKGLEWVGRIRNKASSYTTEYAASVKGRFTISRDDSKNSLYLQMNSLKTEDTAVYYCAREPKYWIDFDLWGRGTLVTVSSGGGGSGGGGSGGGGSGGGGSGGGGSGGGGSGGGGSGGGGSGGGGSGGGGSGGGGSGGGGSMAQKRPACTLKPECVQQLLVCSQEAKKSAYCPYSHFPVGAALLTQEGRIFKGCNIENACYPLGICAERTAIQKAVSEGYKDFRAIAIASDMQDDFISPCGACRQVMREFGTNWPVYMTKPDGTYIVMTVQELLPSSFGPEDLQKTQHHHHHH

SEQ ID NO: 34 - protein, 399 aa, synthetic construct
DIQMTQSPSSLSASVGDRVTITCRASQSISSYLNWYQQKPGKAPKLLIYAASSLQSGVPSRFSGSGSGTDFTLTISSLQPEDFATYYCQQSYIAPYTFGGGTKVEIKGGGGSGGGGSGGGGSEVQLVESGGGLVQPGRSLRLSCTASGFTFSDHDMNWVRQAPGKGLEWVGRTRNAAGSYTTEYAASVKGRFTISRDDSKNSLYLQMNSLKTEDTAVYYCAREPKYWIDFDLWGRGTLVTSSGGGGSMAQKRPACTLKPECVQQLLVCSQEAKKSAYCPYSHFPVGAALLTQEGRIFKGCNIENACYPLGICAERTAIQKAVSEGYKDFRAIAIASDMQDDFISPCGACRQVMREFGTNWPVYMTKPDGTYIVMTVQELLPSSFGPEDLQKTQHHHHHH

SEQ ID NO: 35 - protein, 409 aa, synthetic construct
DIQMTQSPSSLSASVGDRVTITCRASQSISSYLNWYQQKPGKAPKLLIYAASSLQSGVPSRFSGSGSGTDFTLTISSLQPEDFATYYCQQSYIAPYTFGGGTKVEIKGGGGSGGGGSGGGGSEVQLVESGGGLVQPGRSLRLSCTASGFTFSDHDMNWVRQAPGKGLEWVGRTRNAAGSYTTEYAASVKGRFTISRDDSKNSLYLQMNSLKTEDTAVYYCAREPKYWIDFDLWGRGTLVTSSGGGGSGGGGSGGGGSMAQKRPACTLKPECVQQLLVCSQEAKKSAYCPYSHFPVGAALLTQEGRIFKGCNIENACYPLGICAERTAIQKAVSEGYKDFRAIAIASDMQDDFISPCGACRQVMREFGTNWPVYMTKPDGTYIVMTVQELLPSSFGPEDLQKTQHHHHHH

SEQ ID NO: 36 - protein, 414 aa, synthetic construct
DIQMTQSPSSLSASVGDRVTITCRASQSISSYLNWYQQKPGKAPKLLIYAASSLQSGVPSRFSGSGSGTDFTLTISSLQPEDFATYYCQQSYIAPYTFGGGTKVEIKGGGGSGGGGSGGGGSEVQLVESGGGLVQPGRSLRLSCTASGFTFSDHDMNWVRQAPGKGLEWVGRTRNAAGSYTTEYAASVKGRFTISRDDSKNSLYLQMNSLKTEDTAVYYCAREPKYWIDFDLWGRGTLVTSSGGGGSGGGGSGGGGSGGGGSMAQKRPACTLKPECVQQLLVCSQEAKKSAYCPYSHFPVGAALLTQEGRIFKGCNIENACYPLGICAERTAIQKAVSEGYKDFRAIAIASDMQDDFISPCGACRQVMREFGTNWPVYMTKPDGTYIVMTVQELLPSSFGPEDLQKTQHHHHHH

SEQ ID NO: 37 - protein, 419 aa, synthetic construct
DIQMTQSPSSLSASVGDRVTITCRASQSISSYLNWYQQKPGKAPKLLIYAASSLQSGVPSRFSGSGSGTDFTLTISSLQPEDFATYYCQQSYIAPYTFGGGTKVEIKGGGGSGGGGSGGGGSEVQLVESGGGLVQPGRSLRLSCTASGFTFSDHDMNWVRQAPGKGLEWVGRTRNAAGSYTTEYAASVKGRFTISRDDSKNSLYLQMNSLKTEDTAVYYCAREPKYWIDFDLWGRGTLVTSSGGGGSGGGGSGGGGSGGGGSGGGGSMAQKRPACTLKPECVQQLLVCSQEAKKSAYCPYSHFPVGAALLTQEGRIFKGCNIENACYPLGICAERTAIQKAVSEGYKDFRAIAIASDMQDDFISPCGACRQVMREFGTNWPVYMTKPDGTYIVMTVQELLPSSFGPEDLQKTQHHHHHH

SEQ ID NO: 38 - protein, 424 aa, synthetic construct
DIQMTQSPSSLSASVGDRVTITCRASQSISSYLNWYQQKPGKAPKLLIYAASSLQSGVPSRFSGSGSGTDFTLTISSLQPEDFATYYCQQSYIAPYTFGGGTKVEIKGGGGSGGGGSGGGGSEVQLVESGGGLVQPGRSLRLSCTASGFTFSDHDMNWVRQAPGKGLEWVGRTRNAAGSYTTEYAASVKGRFTISRDDSKNSLYLQMNSLKTEDTAVYYCAREPKYWIDFDLWGRGTLVTSSGGGGSGGGGSGGGGSGGGGSGGGGSGGGGSMAQKRPACTLKPECVQQLLVCSQEAKKSAYCPYSHFPVGAALLTQEGRIFKGCNIENACYPLGICAERTAIQKAVSEGYKDFRAIAIASDMQDDFISPCGACRQVMREFGTNWPVYMTKPDGTYIVMTVQELLPSSFGPEDLQKTQHHHHHH

SEQ ID NO: 39 - protein, 429 aa, synthetic construct
DIQMTQSPSSLSASVGDRVTITCRASQSISSYLNWYQQKPGKAPKLLIYAASSLQSGVPSRFSGSGSGTDFTLTISSLQPEDFATYYCQQSYIAPYTFGGGTKVEIKGGGGSGGGGSGGGGSEVQLVESGGGLVQPGRSLRLSCTASGFTFSDHDMNWVRQAPGKGLEWVGRTRNAAGSYTTEYAASVKGRFTISRDDSKNSLYLQMNSLKTEDTAVYYCAREPKYWIDFDLWGRGTLVTSSGGGGSGGGGSGGGGSGGGGSGGGGSGGGGSGGGGSMAQKRPACTLKPECVQQLLVCSQEAKKSAYCPYSHFPVGAALLTQEGRIFKGCNIENACYPLGICAERTAIQKAVSEGYKDFRAIAIASDMQDDFISPCGACRQVMREFGTNWPVYMTKPDGTYIVMTVQELLPSSFGPEDLQKTQHHHHHH

SEQ ID NO: 40 - protein, 434 aa, synthetic construct
DIQMTQSPSSLSASVGDRVTITCRASQSISSYLNWYQQKPGKAPKLLIYAASSLQSGVPSRFSGSGSGTDFTLTISSLQPEDFATYYCQQSYIAPYTFGGGTKVEIKGGGGSGGGGSGGGGSEVQLVESGGGLVQPGRSLRLSCTASGFTFSDHDMNWVRQAPGKGLEWVGRTRNAAGSYTTEYAASVKGRFTISRDDSKNSLYLQMNSLKTEDTAVYYCAREPKYWIDFDLWGRGTLVTSSGGGGSGGGGSGGGGSGGGGSGGGGSGGGGSGGGGSGGGGSMAQKRPACTLKPECVQQLLVCSQEAKKSAYCPYSHFPVGAALLTQEGRIFKGCNIENACYPLGICAERTAIQKAVSEGYKDFRAIAIASDMQDDFISPCGACRQVMREFGTNWPVYMTKPDGTYIVMTVQELLPSSFGPEDLQKTQHHHHHH

SEQ ID NO: 41 - protein, 439 aa, synthetic construct
DIQMTQSPSSLSASVGDRVTITCRASQSISSYLNWYQQKPGKAPKLLIYAASSLQSGVPSRFSGSGSGTDFTLTISSLQPEDFATYYCQQSYIAPYTFGGGTKVEIKGGGGSGGGGSGGGGSEVQLVESGGGLVQPGRSLRLSCTASGFTFSDHDMNWVRQAPGKGLEWVGRTRNAAGSYTTEYAASVKGRFTISRDDSKNSLYLQMNSLKTEDTAVYYCAREPKYWIDFDLWGRGTLVTSSGGGGSGGGGSGGGGSGGGGSGGGGSGGGGSGGGGSGGGGSGGGGSMAQKRPACTLKPECVQQLLVCSQEAKKSAYCPYSHFPVGAALLTQEGRIFKGCNIENACYPLGICAERTAIQKAVSEGYKDFRAIAIASDMQDDFISPCGACRQVMREFGTNWPVYMTKPDGTYIVMTVQELLPSSFGPEDLQKTQHHHHHH

SEQ ID NO: 42 - protein, 444 aa, synthetic construct
DIQMTQSPSSLSASVGDRVTITCRASQSISSYLNWYQQKPGKAPKLLIYAASSLQSGVPSRFSGSGSGTDFTLTISSLQPEDFATYYCQQSYIAPYTFGGGTKVEIKGGGGSGGGGSGGGGSEVQLVESGGGLVQPGRSLRLSCTASGFTFSDHDMNWVRQAPGKGLEWVGRTRNAAGSYTTEYAASVKGRFTISRDDSKNSLYLQMNSLKTEDTAVYYCAREPKYWIDFDLWGRGTLVTSSGGGGSGGGGSGGGGSGGGGSGGGGSGGGGSGGGGSGGGGSGGGGSGGGGSMAQKRPACTLKPECVQQLLVCSQEAKKSAYCPYSHFPVGAALLTQEGRIFKGCNIENACYPLGICAERTAIQKAVSEGYKDFRAIAIASDMQDDFISPCGACRQVMREFGTNWPVYMTKPDGTYIVMTVQELLPSSFGPEDLQKTQHHHHHH

SEQ ID NO: 43 - protein, 449 aa, synthetic construct
DIQMTQSPSSLSASVGDRVTITCRASQSISSYLNWYQQKPGKAPKLLIYAASSLQSGVPSRFSGSGSGTDFTLTISSLQPEDFATYYCQQSYIAPYTFGGGTKVEIKGGGGSGGGGSGGGGSEVQLVESGGGLVQPGRSLRLSCTASGFTFSDHDMNWVRQAPGKGLEWVGRTRNAAGSYTTEYAASVKGRFTISRDDSKNSLYLQMNSLKTEDTAVYYCAREPKYWIDFDLWGRGTLVTSSGGGGSGGGGSGGGGSGGGGSGGGGSGGGGSGGGGSGGGGSGGGGSGGGGSGGGGSMAQKRPACTLKPECVQQLLVCSQEAKKSAYCPYSHFPVGAALLTQEGRIFKGCNIENACYPLGICAERTAIQKAVSEGYKDFRAIAIASDMQDDFISPCGACRQVMREFGTNWPVYMTKPDGTYIVMTVQELLPSSFGPEDLQKTQHHHHHH

SEQ ID NO: 44 - protein, 454 aa, synthetic construct
DIQMTQSPSSLSASVGDRVTITCRASQSISSYLNWYQQKPGKAPKLLIYAASSLQSGVPSRFSGSGSGTDFTLTISSLQPEDFATYYCQQSYIAPYTFGGGTKVEIKGGGGSGGGGSGGGGSEVQLVESGGGLVQPGRSLRLSCTASGFTFSDHDMNWVRQAPGKGLEWVGRTRNAAGSYTTEYAASVKGRFTISRDDSKNSLYLQMNSLKTEDTAVYYCAREPKYWIDFDLWGRGTLVTSSGGGGSGGGGSGGGGSGGGGSGGGGSGGGGSGGGGSGGGGSGGGGSGGGGSGGGGSGGGGSMAQKRPACTLKPECVQQLLVCSQEAKKSAYCPYSHFPVGAALLTQEGRIFKGCNIENACYPLGICAERTAIQKAVSEGYKDFRAIAIASDMQDDFISPCGACRQVMREFGTNWPVYMTKPDGTYIVMTVQELLPSSFGPEDLQKTQHHHHHH

SEQ ID NO: 45 - protein, 399 aa, synthetic construct
EVQLVESGGGLVQPGGSLRLSCAASGETFVDHDMDWVRQAPGKGLEWVGRTRNKLGSYTTEYAASVKGRETGRDDSKNSLYLQMNSLKTEDTAVYYCAREPKYWIDFDLWGRGTLVTVSSGGGGSGGGGSGGGGSDIQMTQSPSSLSASVGDRVTITCRASQSISSYLNWYQQKPGKAPKLLIYAASSLQSGVPSRFSGSGSGTDFTLTISSLQPEDFATYYCQQSYIAPYIFGGGTKVEIKGGGGSMAQKRPACTLKPECVQQLLVCSQEAKKSAYCPYSHFPVGAALLTQEGRIFKGCNIENACYPLGICAERTAIQKAVSEGYKDFRAIAIASDMQDDFISPCGACRQVMREFGTNWPVYMTKPDGTYIVMTVQELLPSSFGPEDLQKTQHHHHHH

SEQ ID NO: 46 - protein, 409 aa, synthetic construct
EVQLVESGGGLVQPGGSLRLSCAASGETFVDHDMDWVRQAPGKGLEWVGRTRNKLGSYTTEYAASVKGRETGRDDSKNSLYLQMNSLKTEDTAVYYCAREPKYWIDFDLWGRGTLVTVSSGGGGSGGGGSGGGGSDIQMTQSPSSLSASVGDRVTITCRASQSISSYLNWYQQKPGKAPKLLIYAASSLQSGVPSRFSGSGSGTDFTLTISSLQPEDFATYYCQQSYIAPYIFGGGTKVEIKGGGGSGGGGSGGGGSMAQKRPACTLKPECVQQLLVCSQEAKKSAYCPYSHFPVGAALLTQEGRIFKGCNIENACYPLGICAERTAIQKAVSEGYKDFRAIAIASDMQDDFISPCGACRQVMREFGTNWPVYMTKPDGTYIVMTVQELLPSSFGPEDLQKTQHHHHHH

SEQ ID NO: 47 - protein, 414 aa, synthetic construct
EVQLVESGGGLVQPGGSLRLSCAASGETFVDHDMDWVRQAPGKGLEWVGRTRNKLGSYTTEYAASVKGRETGRDDSKNSLYLQMNSLKTEDTAVYYCAREPKYWIDFDLWGRGTLVTVSSGGGGSGGGGSGGGGSDIQMTQSPSSLSASVGDRVTITCRASQSISSYLNWYQQKPGKAPKLLIYAASSLQSGVPSRFSGSGSGTDFTLTISSLQPEDFATYYCQQSYIAPYIFGGGTKVEIKGGGGSGGGGSGGGGSGGGGSMAQKRPACTLKPECVQQLLVCSQEAKKSAYCPYSHFPVGAALLTQEGRIFKGCNIENACYPLGICAERTAIQKAVSEGYKDFRAIAIASDMQDDFISPCGACRQVMREFGTNWPVYMTKPDGTYIVMTVQELLPSSFGPEDLQKTQHHHHHH

SEQ ID NO: 48 - protein, 419 aa, synthetic construct
EVQLVESGGGLVQPGGSLRLSCAASGETFVDHDMDWVRQAPGKGLEWVGRTRNKLGSYTTEYAASVKGRETGRDDSKNSLYLQMNSLKTEDTAVYYCAREPKYWIDFDLWGRGTLVTVSSGGGGSGGGGSGGGGSDIQMTQSPSSLSASVGDRVTITCRASQSISSYLNWYQQKPGKAPKLLIYAASSLQSGVPSRFSGSGSGTDFTLTISSLQPEDFATYYCQQSYIAPYIFGGGTKVEIKGGGGSGGGGSGGGGSGGGGSGGGGSMAQKRPACTLKPECVQQLLVCSQEAKKSAYCPYSHFPVGAALLTQEGRIFKGCNIENACYPLGICAERTAIQKAVSEGYKDFRAIAIASDMQDDFISPCGACRQVMREFGTNWPVYMTKPDGTYIVMTVQELLPSSFGPEDLQKTQHHHHHH

SEQ ID NO: 49 - protein, 424 aa, synthetic construct
EVQLVESGGGLVQPGGSLRLSCAASGETFVDHDMDWVRQAPGKGLEWVGRTRNKLGSYTTEYAASVKGRETGRDDSKNSLYLQMNSLKTEDTAVYYCAREPKYWIDFDLWGRGTLVTVSSGGGGSGGGGSGGGGSDIQMTQSPSSLSASVGDRVTITCRASQSISSYLNWYQQKPGKAPKLLIYAASSLQSGVPSRFSGSGSGTDFTLTISSLQPEDFATYYCQQSYIAPYIFGGGTKVEIKGGGGSGGGGSGGGGSGGGGSGGGGSGGGGSMAQKRPACTLKPECVQQLLVCSQEAKKSAYCPYSHFPVGAALLTQEGRIFKGCNIENACYPLGICAERTAIQKAVSEGYKDFRAIAIASDMQDDFISPCGACRQVMREFGTNWPVYMTKPDGTYIVMTVQELLPSSFGPEDLQKTQHHHHHH

SEQ ID NO: 50 - protein, 429 aa, synthetic construct
EVQLVESGGGLVQPGGSLRLSCAASGETFVDHDMDWVRQAPGKGLEWVGRTRNKLGSYTTEYAASVKGRETGRDDSKNSLYLQMNSLKTEDTAVYYCAREPKYWIDFDLWGRGTLVTVSSGGGGSGGGGSGGGGSDIQMTQSPSSLSASVGDRVTITCRASQSISSYLNWYQQKPGKAPKLLIYAASSLQSGVPSRFSGSGSGTDFTLTISSLQPEDFATYYCQQSYIAPYIFGGGTKVEIKGGGGSGGGGSGGGGSGGGGSGGGGSGGGGSGGGGSMAQKRPACTLKPECVQQLLVCSQEAKKSAYCPYSHFPVGAALLTQEGRIFKGCNIENACYPLGICAERTAIQKAVSEGYKDFRAIAIASDMQDDFISPCGACRQVMREFGTNWPVYMTKPDGTYIVMTVQELLPSSFGPEDLQKTQHHHHHH

SEQ ID NO: 51 - protein, 434 aa, synthetic construct
EVQLVESGGGLVQPGGSLRLSCAASGETFVDHDMDWVRQAPGKGLEWVGRTRNKLGSYTTEYAASVKGRETGRDDSKNSLYLQMNSLKTEDTAVYYCAREPKYWIDFDLWGRGTLVTVSSGGGGSGGGGSGGGGSDIQMTQSPSSLSASVGDRVTITCRASQSISSYLNWYQQKPGKAPKLLIYAASSLQSGVPSRFSGSGSGTDFTLTISSLQPEDFATYYCQQSYIAPYIFGGGTKVEIKGGGGSGGGGSGGGGSGGGGSGGGGSGGGGSGGGGSGGGGSMAQKRPACTLKPECVQQLLVCSQEAKKSAYCPYSHFPVGAALLTQEGRIFKGCNIENACYPLGICAERTAIQKAVSEGYKDFRAIAIASDMQDDFISPCGACRQVMREFGTNWPVYMTKPDGTYIVMTVQELLPSSFGPEDLQKTQHHHHHH

SEQ ID NO: 52 - protein, 439 aa, synthetic construct
EVQLVESGGGLVQPGGSLRLSCAASGETFVDHDMDWVRQAPGKGLEWVGRTRNKLGSYTTEYAASVKGRETGRDDSKNSLYLQMNSLKTEDTAVYYCAREPKYWIDFDLWGRGTLVTVSSGGGGSGGGGSGGGGSDIQMTQSPSSLSASVGDRVTITCRASQSISSYLNWYQQKPGKAPKLLIYAASSLQSGVPSRFSGSGSGTDFTLTISSLQPEDFATYYCQQSYIAPYIFGGGTKVEIKGGGGSGGGGSGGGGSGGGGSGGGGSGGGGSGGGGSGGGGSGGGGSMAQKRPACTLKPECVQQLLVCSQEAKKSAYCPYSHFPVGAALLTQEGRIFKGCNIENACYPLGICAERTAIQKAVSEGYKDFRAIAIASDMQDDFISPCGACRQVMREFGTNWPVYMTKPDGTYIVMTVQELLPSSFGPEDLQKTQHHHHHH

SEQ ID NO: 53 - protein, 444 aa, synthetic construct
EVQLVESGGGLVQPGGSLRLSCAASGETFVDHDMDWVRQAPGKGLEWVGRTRNKLGSYTTEYAASVKGRETGRDDSKNSLYLQMNSLKTEDTAVYYCAREPKYWIDFDLWGRGTLVTVSSGGGGSGGGGSGGGGSDIQMTQSPSSLSASVGDRVTITCRASQSISSYLNWYQQKPGKAPKLLIYAASSLQSGVPSRFSGSGSGTDFTLTISSLQPEDFATYYCQQSYIAPYIFGGGTKVEIKGGGGSGGGGSGGGGSGGGGSGGGGSGGGGSGGGGSGGGGSGGGGSGGGGSMAQKRPACTLKPECVQQLLVCSQEAKKSAYCPYSHFPVGAALLTQEGRIFKGCNIENACYPLGICAERTAIQKAVSEGYKDFRAIAIASDMQDDFISPCGACRQVMREFGTNWPVYMTKPDGTYIVMTVQELLPSSFGPEDLQKTQHHHHHH

SEQ ID NO: 54 - protein, 449 aa, synthetic construct
EVQLVESGGGLVQPGGSLRLSCAASGETFVDHDMDWVRQAPGKGLEWVGRTRNKLGSYTTEYAASVKGRETGRDDSKNSLYLQMNSLKTEDTAVYYCAREPKYWIDFDLWGRGTLVTVSSGGGGSGGGGSGGGGSDIQMTQSPSSLSASVGDRVTITCRASQSISSYLNWYQQKPGKAPKLLIYAASSLQSGVPSRFSGSGSGTDFTLTISSLQPEDFATYYCQQSYIAPYIFGGGTKVEIKGGGGSGGGGSGGGGSGGGGSGGGGSGGGGSGGGGSGGGGSGGGGSGGGGSGGGGSMAQKRPACTLKPECVQQLLVCSQEAKKSAYCPYSHFPVGAALLTQEGRIFKGCNIENACYPLGICAERTAIQKAVSEGYKDFRAIAIASDMQDDFISPCGACRQVMREFGTNWPVYMTKPDGTYIVMTVQELLPSSFGPEDLQKTQHHHHHH

SEQ ID NO: 55 - protein, 454 aa, synthetic construct
EVQLVESGGGLVQPGGSLRLSCAASGETFVDHDMDWVRQAPGKGLEWVGRTRNKLGSYTTEYAASVKGRETGRDDSKNSLYLQMNSLKTEDTAVYYCAREPKYWIDFDLWGRGTLVTVSSGGGGSGGGGSGGGGSDIQMTQSPSSLSASVGDRVTITCRASQSISSYLNWYQQKPGKAPKLLIYAASSLQSGVPSRFSGSGSGTDFTLTISSLQPEDFATYYCQQSYIAPYIFGGGTKVEIKGGGGSGGGGSGGGGSGGGGSGGGGSGGGGSGGGGSGGGGSGGGGSGGGGSGGGGSGGGGSMAQKRPACTLKPECVQQLLVCSQEAKKSAYCPYSHFPVGAALLTQEGRIFKGCNIENACYPLGICAERTAIQKAVSEGYKDFRAIAIASDMQDDFISPCGACRQVMREFGTNWPVYMTKPDGTYIVMTVQELLPSSFGPEDLQKTQHHHHHH

SEQ ID NO: 56 - protein, 403 aa, synthetic construct
EVQLLESGGGLVQPGGSLRLSCAASGETFSNYAMSWVRQAPGKGLEWVSAISGSGGSTYYADSVKGRFTISRDNSKNTLYLQMNSLRAEDTAVYYCAKGPPTYHTNYYYMDVWGKGTTVTVSSGGGGSGGGGSGGGGSDIQMTQSPSSVSASVGDRVTITCRASQGISSWLAWYQQKPGKAPKLLLIYAASSLQSGVPSRFSGSGSGTDFTLTISSLQPEDFATYYCQQTNSFPYTFGGGTKVEIKGGGGSMAQKRPACTLKPECVQQLLVCSQEAKKSAYCPYSHFPVGAALLTQEGRIFKGCNIENACYPLGICAERTAIQKAVSEGYKDFRAIAIASDMQDDFISPCGACRQVMREFGTNWPVYMTKPDGTYIVMTVQELLPSSFGPEDLQKTQHHHHHH

SEQ ID NO: 57 - protein, 413 aa, synthetic construct
EVQLLESGGGLVQPGGSLRLSCAASGETFSNYAMSWVRQAPGKGLEWVSAISGSGGSTYYADSVKGRFTISRDNSKNTLYLQMNSLRAEDTAVYYCAKGPPTYHTNYYYMDVWGKGTTVTVSSGGGGSGGGGSGGGGSDIQMTQSPSSVSASVGDRVTITCRASQGISSWLAWYQQKPGKAPKLLLIYAASSLQSGVPSRFSGSGSGTDFTLTISSLQPEDFATYYCQQTNSFPYTFGGGTKVEIKGGGGSGGGGSGGGGSMAQKRPACTLKPECVQQLLVCSQEAKKSAYCPYSHFPVGAALLTQEGRIFKGCNIENACYPLGICAERTAIQKAVSEGYKDFRAIAIASDMQDDFISPCGACRQVMREFGTNWPVYMTKPDGTYIVMTVQELLPSSFGPEDLQKTQHHHHHH

SEQ ID NO: 58 - protein, 418 aa, synthetic construct
EVQLLESGGGLVQPGGSLRLSCAASGETFSNYAMSWVRQAPGKGLEWVSAISGSGGSTYYADSVKGRFTISRDNSKNTLYLQMNSLRAEDTAVYYCAKGPPTYHTNYYYMDVWGKGTTVTVSSGGGGSGGGGSGGGGSDIQMTQSPSSVSASVGDRVTITCRASQGISSWLAWYQQKPGKAPKLLLIYAASSLQSGVPSRFSGSGSGTDFTLTISSLQPEDFATYYCQQTNSFPYTFGGGTKVEIKGGGGSGGGGSGGGGSGGGGSMAQKRPACTLKPECVQQLLVCSQEAKKSAYCPYSHFPVGAALLTQEGRIFKGCNIENACYPLGICAERTAIQKAVSEGYKDFRAIAIASDMQDDFISPCGACRQVMREFGTNWPVYMTKPDGTYIVMTVQELLPSSFGPEDLQKTQHHHHHH

SEQ ID NO: 59 - protein, 423 aa, synthetic construct
EVQLLESGGGLVQPGGSLRLSCAASGETFSNYAMSWVRQAPGKGLEWVSAISGSGGSTYYADSVKGRFTISRDNSKNTLYLQMNSLRAEDTAVYYCAKGPPTYHTNYYYMDVWGKGTTVTVSSGGGGSGGGGSGGGGSDIQMTQSPSSVSASVGDRVTITCRASQGISSWLAWYQQKPGKAPKLLLIYAASSLQSGVPSRFSGSGSGTDFTLTISSLQPEDFATYYCQQTNSFPYTFGGGTKVEIKGGGGSGGGGSGGGGSGGGGSGGGGSMAQKRPACTLKPECVQQLLVCSQEAKKSAYCPYSHFPVGAALLTQEGRIFKGCNIENACYPLGICAERTAIQKAVSEGYKDFRAIAIASDMQDDFISPCGACRQVMREFGTNWPVYMTKPDGTYIVMTVQELLPSSFGPEDLQKTQHHHHHH

SEQ ID NO: 60 - protein, 428 aa, synthetic construct
EVQLLESGGGLVQPGGSLRLSCAASGETFSNYAMSWVRQAPGKGLEWVSAISGSGGSTYYADSVKGRFTISRDNSKNTLYLQMNSLRAEDTAVYYCAKGPPTYHTNYYYMDVWGKGTTVTVSSGGGGSGGGGSGGGGSDIQMTQSPSSVSASVGDRVTITCRASQGISSWLAWYQQKPGKAPKLLLIYAASSLQSGVPSRFSGSGSGTDFTLTISSLQPEDFATYYCQQTNSFPYTFGGGTKVEIKGGGGSGGGGSGGGGSGGGGSGGGGSGGGGSMAQKRPACTLKPECVQQLLVCSQEAKKSAYCPYSHFPVGAALLTQEGRIFKGCNIENACYPLGICAERTAIQKAVSEGYKDFRAIAIASDMQDDFISPCGACRQVMREFGTNWPVYMTKPDGTYIVMTVQELLPSSFGPEDLQKTQHHHHHH

SEQ ID NO: 61 - protein, 433 aa, synthetic construct
EVQLLESGGGLVQPGGSLRLSCAASGETFSNYAMSWVRQAPGKGLEWVSAISGSGGSTYYADSVKGRFTISRDNSKNTLYLQMNSLRAEDTAVYYCAKGPPTYHTNYYYMDVWGKGTTVTVSSGGGGSGGGGSGGGGSDIQMTQSPSSVSASVGDRVTITCRASQGISSWLAWYQQKPGKAPKLLLIYAASSLQSGVPSRFSGSGSGTDFTLTISSLQPEDFATYYCQQTNSFPYTFGGGTKVEIKGGGGSGGGGSGGGGSGGGGSGGGGSGGGGSGGGGSMAQKRPACTLKPECVQQLLVCSQEAKKSAYCPYSHFPVGAALLTQEGRIFKGCNIENACYPLGICAERTAIQKAVSEGYKDFRAIAIASDMQDDFISPCGACRQVMREFGTNWPVYMTKPDGTYIVMTVQELLPSSFGPEDLQKTQHHHHHH

SEQ ID NO: 62 - protein, 438 aa, synthetic construct
EVQLLESGGGLVQPGGSLRLSCAASGETFSNYAMSWVRQAPGKGLEWVSAISGSGGSTYYADSVKGRFTISRDNSKNTLYLQMNSLRAEDTAVYYCAKGPPTYHTNYYYMDVWGKGTTVTVSSGGGGSGGGGSGGGGSDIQMTQSPSSVSASVGDRVTITCRASQGISSWLAWYQQKPGKAPKLLLIYAASSLQSGVPSRFSGSGSGTDFTLTISSLQPEDFATYYCQQTNSFPYTFGGGTKVEIKGGGGSGGGGSGGGGSGGGGSGGGGSGGGGSGGGGSGGGGSMAQKRPACTLKPECVQQLLVCSQEAKKSAYCPYSHFPVGAALLTQEGRIFKGCNIENACYPLGICAERTAIQKAVSEGYKDFRAIAIASDMQDDFISPCGACRQVMREFGTNWPVYMTKPDGTYIVMTVQELLPSSFGPEDLQKTQHHHHHH

SEQ ID NO: 63 - protein, 443 aa, synthetic construct
EVQLLESGGGLVQPGGSLRLSCAASGETFSNYAMSWVRQAPGKGLEWVSAISGSGGSTYYADSVKGRFTISRDNSKNTLYLQMNSLRAEDTAVYYCAKGPPTYHTNYYYMDVWGKGTTVTVSSGGGGSGGGGSGGGGSDIQMTQSPSSVSASVGDRVTITCRASQGISSWLAWYQQKPGKAPKLLLIYAASSLQSGVPSRFSGSGSGTDFTLTISSLQPEDFATYYCQQTNSFPYTFGGGTKVEIKGGGGSGGGGSGGGGSGGGGSGGGGSGGGGSGGGGSGGGGSGGGGSMAQKRPACTLKPECVQQLLVCSQEAKKSAYCPYSHFPVGAALLTQEGRIFKGCNIENACYPLGICAERTAIQKAVSEGYKDFRAIAIASDMQDDFISPCGACRQVMREFGTNWPVYMTKPDGTYIVMTVQELLPSSFGPEDLQKTQHHHHHH

SEQ ID NO: 64 - protein, 448 aa, synthetic construct
EVQLLESGGGLVQPGGSLRLSCAASGETFSNYAMSWVRQAPGKGLEWVSAISGSGGSTYYADSVKGRFTISRDNSKNTLYLQMNSLRAEDTAVYYCAKGPPTYHTNYYYMDVWGKGTTVTVSSGGGGSGGGGSGGGGSDIQMTQSPSSVSASVGDRVTITCRASQGISSWLAWYQQKPGKAPKLLLIYAASSLQSGVPSRFSGSGSGTDFTLTISSLQPEDFATYYCQQTNSFPYTFGGGTKVEIKGGGGSGGGGSGGGGSGGGGSGGGGSGGGGSGGGGSGGGGSGGGGSGGGGSMAQKRPACTLKPECVQQLLVCSQEAKKSAYCPYSHFPVGAALLTQEGRIFKGCNIENACYPLGICAERTAIQKAVSEGYKDFRAIAIASDMQDDFISPCGACRQVMREFGTNWPVYMTKPDGTYIVMTVQELLPSSFGPEDLQKTQHHHHHH

SEQ ID NO: 65 - protein, 453 aa, synthetic construct
EVQLLESGGGLVQPGGSLRLSCAASGETFSNYAMSWVRQAPGKGLEWVSAISGSGGSTYYADSVKGRFTISRDNSKNTLYLQMNSLRAEDTAVYYCAKGPPTYHTNYYYMDVWGKGTTVTVSSGGGGSGGGGSGGGGSDIQMTQSPSSVSASVGDRVTITCRASQGISSWLAWYQQKPGKAPKLLLIYAASSLQSGVPSRFSGSGSGTDFTLTISSLQPEDFATYYCQQTNSFPYTFGGGTKVEIKGGGGSGGGGSGGGGSGGGGSGGGGSGGGGSGGGGSGGGGSGGGGSGGGGSGGGGSMAQKRPACTLKPECVQQLLVCSQEAKKSAYCPYSHFPVGAALLTQEGRIFKGCNIENACYPLGICAERTAIQKAVSEGYKDFRAIAIASDMQDDFISPCGACRQVMREFGTNWPVYMTKPDGTYIVMTVQELLPSSFGPEDLQKTQHHHHHH

SEQ ID NO: 66 - protein, 458 aa, synthetic construct
EVQLLESGGGLVQPGGSLRLSCAASGETFSNYAMSWVRQAPGKGLEWVSAISGSGGSTYYADSVKGRFTISRDNSKNTLYLQMNSLRAEDTAVYYCAKGPPTYHTNYYYMDVWGKGTTVTVSSGGGGSGGGGSGGGGSDIQMTQSPSSVSASVGDRVTITCRASQGISSWLAWYQQKPGKAPKLLLIYAASSLQSGVPSRFSGSGSGTDFTLTISSLQPEDFATYYCQQTNSFPYTFGGGTKVEIKGGGGSGGGGSGGGGSGGGGSGGGGSGGGGSGGGGSGGGGSGGGGSGGGGSGGGGSGGGGSMAQKRPACTLKPECVQQLLVCSQEAKKSAYCPYSHFPVGAALLTQEGRIFKGCNIENACYPLGICAERTAIQKAVSEGYKDFRAIAIASDMQDDFISPCGACRQVMREFGTNWPVYMTKPDGTYIVMTVQELLPSSFGPEDLQKTQHHHHHH

SEQ ID NO: 67 - protein, 403 aa, synthetic construct
EVQLLESGGGLVQPGGSLRLSCAASGETESSYVMIWVRQAPGKGLEWVSSISGDSVTTYYADSVKGRFTISRDNSKNTLYLOMNSLRAEDTAVYYCAKGPPTYHTNYYYMDVWGKGTTVTVSSGGGGSGGGGSGGGGSDIQMTQSPSSVSASVGDRVTITCRASQGISSWLAWYQQKPGKAPKLLIYAASSLOQSGVPSRFSGSGSGTDFTLTISSLQPEDFATYYCQQTNSEPYTFGGGTKVEIKGGGGSMAQKRPACTLKPECVQQLLVCSQEAKKSAYCPYSHFPVGAALLTQEGRIFKGCNIENACYPLGICAERTAIQKAVSEGYKDFRAIAIASDMQDDFISPCGACRQVMREFGTNWPVYMTKPDGTYIVMTVQELLPSSFGPEDLQKTQHHHHHH

SEQ ID NO: 68 - protein, 413 aa, synthetic construct
EVQLLESGGGLVQPGGSLRLSCAASGETESSYVMIWVRQAPGKGLEWVSSISGDSVTTYYADSVKGRFTISRDNSKNTLYLOMNSLRAEDTAVYYCAKGPPTYHTNYYYMDVWGKGTTVTVSSGGGGSGGGGSGGGGSDIQMTQSPSSVSASVGDRVTITCRASQGISSWLAWYQQKPGKAPKLLIYAASSLOQSGVPSRFSGSGSGTDFTLTISSLQPEDFATYYCQQTNSEPYTFGGGTKVEIKGGGGSGGGGSGGGGSMAQKRPACTLKPECVQQLLVCSQEAKKSAYCPYSHFPVGAALLTQEGRIFKGCNIENACYPLGICAERTAIQKAVSEGYKDFRAIAIASDMQDDFISPCGACRQVMREFGTNWPVYMTKPDGTYIVMTVQELLPSSFGPEDLQKTQHHHHHH

SEQ ID NO: 69 - protein, 418 aa, synthetic construct
EVQLLESGGGLVQPGGSLRLSCAASGETESSYVMIWVRQAPGKGLEWVSSISGDSVTTYYADSVKGRFTISRDNSKNTLYLOMNSLRAEDTAVYYCAKGPPTYHTNYYYMDVWGKGTTVTVSSGGGGSGGGGSGGGGSDIQMTQSPSSVSASVGDRVTITCRASQGISSWLAWYQQKPGKAPKLLIYAASSLOQSGVPSRFSGSGSGTDFTLTISSLQPEDFATYYCQQTNSEPYTFGGGTKVEIKGGGGSGGGGSGGGGSGGGGSMAQKRPACTLKPECVQQLLVCSQEAKKSAYCPYSHFPVGAALLTQEGRIFKGCNIENACYPLGICAERTAIQKAVSEGYKDFRAIAIASDMQDDFISPCGACRQVMREFGTNWPVYMTKPDGTYIVMTVQELLPSSFGPEDLQKTQHHHHHH

SEQ ID NO: 70 - protein, 423 aa, synthetic construct
EVQLLESGGGLVQPGGSLRLSCAASGETESSYVMIWVRQAPGKGLEWVSSISGDSVTTYYADSVKGRFTISRDNSKNTLYLOMNSLRAEDTAVYYCAKGPPTYHTNYYYMDVWGKGTTVTVSSGGGGSGGGGSGGGGSDIQMTQSPSSVSASVGDRVTITCRASQGISSWLAWYQQKPGKAPKLLIYAASSLOQSGVPSRFSGSGSGTDFTLTISSLQPEDFATYYCQQTNSEPYTFGGGTKVEIKGGGGSGGGGSGGGGSGGGGSGGGGSMAQKRPACTLKPECVQQLLVCSQEAKKSAYCPYSHFPVGAALLTQEGRIFKGCNIENACYPLGICAERTAIQKAVSEGYKDFRAIAIASDMQDDFISPCGACRQVMREFGTNWPVYMTKPDGTYIVMTVQELLPSSFGPEDLQKTQHHHHHH

SEQ ID NO: 71 - protein, 428 aa, synthetic construct
EVQLLESGGGLVQPGGSLRLSCAASGETESSYVMIWVRQAPGKGLEWVSSISGDSVTTYYADSVKGRFTISRDNSKNTLYLOMNSLRAEDTAVYYCAKGPPTYHTNYYYMDVWGKGTTVTVSSGGGGSGGGGSGGGGSDIQMTQSPSSVSASVGDRVTITCRASQGISSWLAWYQQKPGKAPKLLIYAASSLOQSGVPSRFSGSGSGTDFTLTISSLQPEDFATYYCQQTNSEPYTFGGGTKVEIKGGGGSGGGGSGGGGSGGGGSGGGGSGGGGSMAQKRPACTLKPECVQQLLVCSQEAKKSAYCPYSHFPVGAALLTQEGRIFKGCNIENACYPLGICAERTAIQKAVSEGYKDFRAIAIASDMQDDFISPCGACRQVMREFGTNWPVYMTKPDGTYIVMTVQELLPSSFGPEDLQKTQHHHHHH

SEQ ID NO: 72 - protein, 433 aa, synthetic construct
EVQLLESGGGLVQPGGSLRLSCAASGETESSYVMIWVRQAPGKGLEWVSSISGDSVTTYYADSVKGRFTISRDNSKNTLYLOMNSLRAEDTAVYYCAKGPPTYHTNYYYMDVWGKGTTVTVSSGGGGSGGGGSGGGGSDIQMTQSPSSVSASVGDRVTITCRASQGISSWLAWYQQKPGKAPKLLIYAASSLOQSGVPSRFSGSGSGTDFTLTISSLQPEDFATYYCQQTNSEPYTFGGGTKVEIKGGGGSGGGGSGGGGSGGGGSGGGGSGGGGSGGGGSMAQKRPACTLKPECVQQLLVCSQEAKKSAYCPYSHFPVGAALLTQEGRIFKGCNIENACYPLGICAERTAIQKAVSEGYKDFRAIAIASDMQDDFISPCGACRQVMREFGTNWPVYMTKPDGTYIVMTVQELLPSSFGPEDLQKTQHHHHHH

SEQ ID NO: 73 - protein, 438 aa, synthetic construct
EVQLLESGGGLVQPGGSLRLSCAASGETESSYVMIWVRQAPGKGLEWVSSISGDSVTTYYADSVKGRFTISRDNSKNTLYLOMNSLRAEDTAVYYCAKGPPTYHTNYYYMDVWGKGTTVTVSSGGGGSGGGGSGGGGSDIQMTQSPSSVSASVGDRVTITCRASQGISSWLAWYQQKPGKAPKLLIYAASSLOQSGVPSRFSGSGSGTDFTLTISSLQPEDFATYYCQQTNSEPYTFGGGTKVEIKGGGGSGGGGSGGGGSGGGGSGGGGSGGGGSGGGGSGGGGSMAQKRPACTLKPECVQQLLVCSQEAKKSAYCPYSHFPVGAALLTQEGRIFKGCNIENACYPLGICAERTAIQKAVSEGYKDFRAIAIASDMQDDFISPCGACRQVMREFGTNWPVYMTKPDGTYIVMTVQELLPSSFGPEDLQKTQHHHHHH

SEQ ID NO: 74 - protein, 443 aa, synthetic construct
EVQLLESGGGLVQPGGSLRLSCAASGETESSYVMIWVRQAPGKGLEWVSSISGDSVTTYYADSVKGRFTISRDNSKNTLYLOMNSLRAEDTAVYYCAKGPPTYHTNYYYMDVWGKGTTVTVSSGGGGSGGGGSGGGGSDIQMTQSPSSVSASVGDRVTITCRASQGISSWLAWYQQKPGKAPKLLIYAASSLOQSGVPSRFSGSGSGTDFTLTISSLQPEDFATYYCQQTNSEPYTFGGGTKVEIKGGGGSGGGGSGGGGSGGGGSGGGGSGGGGSGGGGSGGGGSGGGGSMAQKRPACTLKPECVQQLLVCSQEAKKSAYCPYSHFPVGAALLTQEGRIFKGCNIENACYPLGICAERTAIQKAVSEGYKDFRAIAIASDMQDDFISPCGACRQVMREFGTNWPVYMTKPDGTYIVMTVQELLPSSFGPEDLQKTQHHHHHH

SEQ ID NO: 75 - protein, 448 aa, synthetic construct
EVQLLESGGGLVQPGGSLRLSCAASGETESSYVMIWVRQAPGKGLEWVSSISGDSVTTYYADSVKGRFTISRDNSKNTLYLOMNSLRAEDTAVYYCAKGPPTYHTNYYYMDVWGKGTTVTVSSGGGGSGGGGSGGGGSDIQMTQSPSSVSASVGDRVTITCRASQGISSWLAWYQQKPGKAPKLLIYAASSLOQSGVPSRFSGSGSGTDFTLTISSLQPEDFATYYCQQTNSEPYTFGGGTKVEIKGGGGSGGGGSGGGGSGGGGSGGGGSGGGGSGGGGSGGGGSGGGGSGGGGSMAQKRPACTLKPECVQQLLVCSQEAKKSAYCPYSHFPVGAALLTQEGRIFKGCNIENACYPLGICAERTAIQKAVSEGYKDFRAIAIASDMQDDFISPCGACRQVMREFGTNWPVYMTKPDGTYIVMTVQELLPSSFGPEDLQKTQHHHHHH

SEQ ID NO: 76 - protein, 453 aa, synthetic construct
EVQLLESGGGLVQPGGSLRLSCAASGETESSYVMIWVRQAPGKGLEWVSSISGDSVTTYYADSVKGRFTISRDNSKNTLYLOMNSLRAEDTAVYYCAKGPPTYHTNYYYMDVWGKGTTVTVSSGGGGSGGGGSGGGGSDIQMTQSPSSVSASVGDRVTITCRASQGISSWLAWYQQKPGKAPKLLIYAASSLOQSGVPSRFSGSGSGTDFTLTISSLQPEDFATYYCQQTNSEPYTFGGGTKVEIKGGGGSGGGGSGGGGSGGGGSGGGGSGGGGSGGGGSGGGGSGGGGSGGGGSGGGGSMAQKRPACTLKPECVQQLLVCSQEAKKSAYCPYSHFPVGAALLTQEGRIFKGCNIENACYPLGICAERTAIQKAVSEGYKDFRAIAIASDMQDDFISPCGACRQVMREFGTNWPVYMTKPDGTYIVMTVQELLPSSFGPEDLQKTQHHHHHH

SEQ ID NO: 77 - protein, 458 aa, synthetic construct
EVQLLESGGGLVQPGGSLRLSCAASGETESSYVMIWVRQAPGKGLEWVSSISGDSVTTYYADSVKGRFTISRDNSKNTLYLOMNSLRAEDTAVYYCAKGPPTYHTNYYYMDVWGKGTTVTVSSGGGGSGGGGSGGGGSDIQMTQSPSSVSASVGDRVTITCRASQGISSWLAWYQQKPGKAPKLLIYAASSLOQSGVPSRFSGSGSGTDFTLTISSLQPEDFATYYCQQTNSEPYTFGGGTKVEIKGGGGSGGGGSGGGGSGGGGSGGGGSGGGGSGGGGSGGGGSGGGGSGGGGSGGGGSGGGGSMAQKRPACTLKPECVQQLLVCSQEAKKSAYCPYSHFPVGAALLTQEGRIFKGCNIENACYPLGICAERTAIQKAVSEGYKDFRAIAIASDMQDDFISPCGACRQVMREFGTNWPVYMTKPDGTYIVMTVQELLPSSFGPEDLQKTQHHHHHH

SEQ ID NO: 78 - protein, 422 aa, synthetic construct
EVQLVESGGGLVQPGGSLRLSCAASGETFSDHYMDWVRQAPGKGLASGETFSDHYMDWVRQAPGKGLEWVGRIRNKASSYTTEYAASVKGRFTISRDDSKNSLYLQMNSLKTEDTAVYYCAREPKYWIDFDLWGRGTLVTVSSGGGGSGGGGSGGGGSDIQMTQSPSSLSASVGDRVTITCRASQSISSYLNWYQQKPGKAPKLLIYAASSLQSGVPSRFSGSGSGTDFTLTISSLQPEDFATYYCQQSYIAPYTFGGGTKVEIKGGGGSMAQKRPACTLKPECVQQLLVCSQEAKKSAYCPYSHFPVGAALLTQEGRIFKGCNIENACYPLGICAERTAIQKAVSEGYKDFRAIAIASDMQDDFISPCGACRQVMREFGTNWPVYMTKPDGTYIVMTVQELLPSSFGPEDLQKTQHHHHHH

SEQ ID NO: 79 - protein, 432 aa, synthetic construct
EVQLVESGGGLVQPGGSLRLSCAASGETFSDHYMDWVRQAPGKGLASGETFSDHYMDWVRQAPGKGLEWVGRIRNKASSYTTEYAASVKGRFTISRDDSKNSLYLQMNSLKTEDTAVYYCAREPKYWIDFDLWGRGTLVTVSSGGGGSGGGGSGGGGSDIQMTQSPSSLSASVGDRVTITCRASQSISSYLNWYQQKPGKAPKLLIYAASSLQSGVPSRFSGSGSGTDFTLTISSLQPEDFATYYCQQSYIAPYTFGGGTKVEIKGGGGSGGGGSGGGGSMAQKRPACTLKPECVQQLLVCSQEAKKSAYCPYSHFPVGAALLTQEGRIFKGCNIENACYPLGICAERTAIQKAVSEGYKDFRAIAIASDMQDDFISPCGACRQVMREFGTNWPVYMTKPDGTYIVMTVQELLPSSFGPEDLQKTQHHHHHH

SEQ ID NO: 80 - protein, 437 aa, synthetic construct
EVQLVESGGGLVQPGGSLRLSCAASGETFSDHYMDWVRQAPGKGLASGETFSDHYMDWVRQAPGKGLEWVGRIRNKASSYTTEYAASVKGRFTISRDDSKNSLYLQMNSLKTEDTAVYYCAREPKYWIDFDLWGRGTLVTVSSGGGGSGGGGSGGGGSDIQMTQSPSSLSASVGDRVTITCRASQSISSYLNWYQQKPGKAPKLLIYAASSLQSGVPSRFSGSGSGTDFTLTISSLQPEDFATYYCQQSYIAPYTFGGGTKVEIKGGGGSGGGGSGGGGSGGGGSMAQKRPACTLKPECVQQLLVCSQEAKKSAYCPYSHFPVGAALLTQEGRIFKGCNIENACYPLGICAERTAIQKAVSEGYKDFRAIAIASDMQDDFISPCGACRQVMREFGTNWPVYMTKPDGTYIVMTVQELLPSSFGPEDLQKTQHHHHHH

SEQ ID NO: 81 - protein, 442 aa, synthetic construct
EVQLVESGGGLVQPGGSLRLSCAASGETFSDHYMDWVRQAPGKGLASGETFSDHYMDWVRQAPGKGLEWVGRIRNKASSYTTEYAASVKGRFTISRDDSKNSLYLQMNSLKTEDTAVYYCAREPKYWIDFDLWGRGTLVTVSSGGGGSGGGGSGGGGSDIQMTQSPSSLSASVGDRVTITCRASQSISSYLNWYQQKPGKAPKLLIYAASSLQSGVPSRFSGSGSGTDFTLTISSLQPEDFATYYCQQSYIAPYTFGGGTKVEIKGGGGSGGGGSGGGGSGGGGSGGGGSMAQKRPACTLKPECVQQLLVCSQEAKKSAYCPYSHFPVGAALLTQEGRIFKGCNIENACYPLGICAERTAIQKAVSEGYKDFRAIAIASDMQDDFISPCGACRQVMREFGTNWPVYMTKPDGTYIVMTVQELLPSSFGPEDLQKTQHHHHHH

SEQ ID NO: 82 - protein, 447 aa, synthetic construct
EVQLVESGGGLVQPGGSLRLSCAASGETFSDHYMDWVRQAPGKGLASGETFSDHYMDWVRQAPGKGLEWVGRIRNKASSYTTEYAASVKGRFTISRDDSKNSLYLQMNSLKTEDTAVYYCAREPKYWIDFDLWGRGTLVTVSSGGGGSGGGGSGGGGSDIQMTQSPSSLSASVGDRVTITCRASQSISSYLNWYQQKPGKAPKLLIYAASSLQSGVPSRFSGSGSGTDFTLTISSLQPEDFATYYCQQSYIAPYTFGGGTKVEIKGGGGSGGGGSGGGGSGGGGSGGGGSGGGGSMAQKRPACTLKPECVQQLLVCSQEAKKSAYCPYSHFPVGAALLTQEGRIFKGCNIENACYPLGICAERTAIQKAVSEGYKDFRAIAIASDMQDDFISPCGACRQVMREFGTNWPVYMTKPDGTYIVMTVQELLPSSFGPEDLQKTQHHHHHH

SEQ ID NO: 83 - protein, 452 aa, synthetic construct
EVQLVESGGGLVQPGGSLRLSCAASGETFSDHYMDWVRQAPGKGLASGETFSDHYMDWVRQAPGKGLEWVGRIRNKASSYTTEYAASVKGRFTISRDDSKNSLYLQMNSLKTEDTAVYYCAREPKYWIDFDLWGRGTLVTVSSGGGGSGGGGSGGGGSDIQMTQSPSSLSASVGDRVTITCRASQSISSYLNWYQQKPGKAPKLLIYAASSLQSGVPSRFSGSGSGTDFTLTISSLQPEDFATYYCQQSYIAPYTFGGGTKVEIKGGGGSGGGGSGGGGSGGGGSGGGGSGGGGSGGGGSMAQKRPACTLKPECVQQLLVCSQEAKKSAYCPYSHFPVGAALLTQEGRIFKGCNIENACYPLGICAERTAIQKAVSEGYKDFRAIAIASDMQDDFISPCGACRQVMREFGTNWPVYMTKPDGTYIVMTVQELLPSSFGPEDLQKTQHHHHHH

SEQ ID NO: 84 - protein, 457 aa, synthetic construct
EVQLVESGGGLVQPGGSLRLSCAASGETFSDHYMDWVRQAPGKGLASGETFSDHYMDWVRQAPGKGLEWVGRIRNKASSYTTEYAASVKGRFTISRDDSKNSLYLQMNSLKTEDTAVYYCAREPKYWIDFDLWGRGTLVTVSSGGGGSGGGGSGGGGSDIQMTQSPSSLSASVGDRVTITCRASQSISSYLNWYQQKPGKAPKLLIYAASSLQSGVPSRFSGSGSGTDFTLTISSLQPEDFATYYCQQSYIAPYTFGGGTKVEIKGGGGSGGGGSGGGGSGGGGSGGGGSGGGGSGGGGSGGGGSMAQKRPACTLKPECVQQLLVCSQEAKKSAYCPYSHFPVGAALLTQEGRIFKGCNIENACYPLGICAERTAIQKAVSEGYKDFRAIAIASDMQDDFISPCGACRQVMREFGTNWPVYMTKPDGTYIVMTVQELLPSSFGPEDLQKTQHHHHHH

SEQ ID NO: 85 - protein, 462 aa, synthetic construct
EVQLVESGGGLVQPGGSLRLSCAASGETFSDHYMDWVRQAPGKGLASGETFSDHYMDWVRQAPGKGLEWVGRIRNKASSYTTEYAASVKGRFTISRDDSKNSLYLQMNSLKTEDTAVYYCAREPKYWIDFDLWGRGTLVTVSSGGGGSGGGGSGGGGSDIQMTQSPSSLSASVGDRVTITCRASQSISSYLNWYQQKPGKAPKLLIYAASSLQSGVPSRFSGSGSGTDFTLTISSLQPEDFATYYCQQSYIAPYTFGGGTKVEIKGGGGSGGGGSGGGGSGGGGSGGGGSGGGGSGGGGSGGGGSGGGGSMAQKRPACTLKPECVQQLLVCSQEAKKSAYCPYSHFPVGAALLTQEGRIFKGCNIENACYPLGICAERTAIQKAVSEGYKDFRAIAIASDMQDDFISPCGACRQVMREFGTNWPVYMTKPDGTYIVMTVQELLPSSFGPEDLQKTQHHHHHH

SEQ ID NO: 86 - protein, 467 aa, synthetic construct
EVQLVESGGGLVQPGGSLRLSCAASGETFSDHYMDWVRQAPGKGLASGETFSDHYMDWVRQAPGKGLEWVGRIRNKASSYTTEYAASVKGRFTISRDDSKNSLYLQMNSLKTEDTAVYYCAREPKYWIDFDLWGRGTLVTVSSGGGGSGGGGSGGGGSDIQMTQSPSSLSASVGDRVTITCRASQSISSYLNWYQQKPGKAPKLLIYAASSLQSGVPSRFSGSGSGTDFTLTISSLQPEDFATYYCQQSYIAPYTFGGGTKVEIKGGGGSGGGGSGGGGSGGGGSGGGGSGGGGSGGGGSGGGGSGGGGSGGGGSMAQKRPACTLKPECVQQLLVCSQEAKKSAYCPYSHFPVGAALLTQEGRIFKGCNIENACYPLGICAERTAIQKAVSEGYKDFRAIAIASDMQDDFISPCGACRQVMREFGTNWPVYMTKPDGTYIVMTVQELLPSSFGPEDLQKTQHHHHHH

SEQ ID NO: 87 - protein, 472 aa, synthetic construct
EVQLVESGGGLVQPGGSLRLSCAASGETFSDHYMDWVRQAPGKGLASGETFSDHYMDWVRQAPGKGLEWVGRIRNKASSYTTEYAASVKGRFTISRDDSKNSLYLQMNSLKTEDTAVYYCAREPKYWIDFDLWGRGTLVTVSSGGGGSGGGGSGGGGSDIQMTQSPSSLSASVGDRVTITCRASQSISSYLNWYQQKPGKAPKLLIYAASSLQSGVPSRFSGSGSGTDFTLTISSLQPEDFATYYCQQSYIAPYTFGGGTKVEIKGGGGSGGGGSGGGGSGGGGSGGGGSGGGGSGGGGSGGGGSGGGGSGGGGSGGGGSMAQKRPACTLKPECVQQLLVCSQEAKKSAYCPYSHFPVGAALLTQEGRIFKGCNIENACYPLGICAERTAIQKAVSEGYKDFRAIAIASDMQDDFISPCGACRQVMREFGTNWPVYMTKPDGTYIVMTVQELLPSSFGPEDLQKTQHHHHHH

SEQ ID NO: 88 - protein, 477 aa, synthetic construct
EVQLVESGGGLVQPGGSLRLSCAASGETFSDHYMDWVRQAPGKGLASGETFSDHYMDWVRQAPGKGLEWVGRIRNKASSYTTEYAASVKGRFTISRDDSKNSLYLQMNSLKTEDTAVYYCAREPKYWIDFDLWGRGTLVTVSSGGGGSGGGGSGGGGSDIQMTQSPSSLSASVGDRVTITCRASQSISSYLNWYQQKPGKAPKLLIYAASSLQSGVPSRFSGSGSGTDFTLTISSLQPEDFATYYCQQSYIAPYTFGGGTKVEIKGGGGSGGGGSGGGGSGGGGSGGGGSGGGGSGGGGSGGGGSGGGGSGGGGSGGGGSGGGGSMAQKRPACTLKPECVQQLLVCSQEAKKSAYCPYSHFPVGAALLTQEGRIFKGCNIENACYPLGICAERTAIQKAVSEGYKDFRAIAIASDMQDDFISPCGACRQVMREFGTNWPVYMTKPDGTYIVMTVQELLPSSFGPEDLQKTQHHHHHH

SEQ ID NO: 89 - protein, 399 aa, synthetic construct
EVQLVESGGGLVQPGRSLRLSCTASGFTFSDHDMNWVRQAPGKGLEWVGRTRNAAGSYTTEYAASVKGRFTISRDDSKNSLYLQMNSLKTEDTAVYYCAREPKYWIDFDLWGRGTLVTSSGGGGSGGGGSGGGGSDIQMTQSPSSLSASVGDRVTITCRASQSISSYLNWYQQKPGKAPKLLIYAASSLQSGVPSRFSGSGSGTDFTLTISSLQPEDFATYYCQQSYIAPYTFGGGTKVEIKGGGGSMAQKRPACTLKPECVQQLLVCSQEAKKSAYCPYSHFPVGAALLTQEGRIFKGCNIENACYPLGICAERTAIQKAVSEGYKDFRAIAIASDMQDDFISPCGACRQVMREFGTNWPVYMTKPDGTYIVMTVQELLPSSFGPEDLQKTQHHHHHH

SEQ ID NO: 90 - protein, 409 aa, synthetic construct
EVQLVESGGGLVQPGRSLRLSCTASGFTFSDHDMNWVRQAPGKGLEWVGRTRNAAGSYTTEYAASVKGRFTISRDDSKNSLYLQMNSLKTEDTAVYYCAREPKYWIDFDLWGRGTLVTSSGGGGSGGGGSGGGGSDIQMTQSPSSLSASVGDRVTITCRASQSISSYLNWYQQKPGKAPKLLIYAASSLQSGVPSRFSGSGSGTDFTLTISSLQPEDFATYYCQQSYIAPYTFGGGTKVEIKGGGGSGGGGSGGGGSMAQKRPACTLKPECVQQLLVCSQEAKKSAYCPYSHFPVGAALLTQEGRIFKGCNIENACYPLGICAERTAIQKAVSEGYKDFRAIAIASDMQDDFISPCGACRQVMREFGTNWPVYMTKPDGTYIVMTVQELLPSSFGPEDLQKTQHHHHHH

SEQ ID NO: 91 - protein, 414 aa, synthetic construct
EVQLVESGGGLVQPGRSLRLSCTASGFTFSDHDMNWVRQAPGKGLEWVGRTRNAAGSYTTEYAASVKGRFTISRDDSKNSLYLQMNSLKTEDTAVYYCAREPKYWIDFDLWGRGTLVTSSGGGGSGGGGSGGGGSDIQMTQSPSSLSASVGDRVTITCRASQSISSYLNWYQQKPGKAPKLLIYAASSLQSGVPSRFSGSGSGTDFTLTISSLQPEDFATYYCQQSYIAPYTFGGGTKVEIKGGGGSGGGGSGGGGSGGGGSMAQKRPACTLKPECVQQLLVCSQEAKKSAYCPYSHFPVGAALLTQEGRIFKGCNIENACYPLGICAERTAIQKAVSEGYKDFRAIAIASDMQDDFISPCGACRQVMREFGTNWPVYMTKPDGTYIVMTVQELLPSSFGPEDLQKTQHHHHHH

SEQ ID NO: 92 - protein, 419 aa, synthetic construct
EVQLVESGGGLVQPGRSLRLSCTASGFTFSDHDMNWVRQAPGKGLEWVGRTRNAAGSYTTEYAASVKGRFTISRDDSKNSLYLQMNSLKTEDTAVYYCAREPKYWIDFDLWGRGTLVTSSGGGGSGGGGSGGGGSDIQMTQSPSSLSASVGDRVTITCRASQSISSYLNWYQQKPGKAPKLLIYAASSLQSGVPSRFSGSGSGTDFTLTISSLQPEDFATYYCQQSYIAPYTFGGGTKVEIKGGGGSGGGGSGGGGSGGGGSGGGGSMAQKRPACTLKPECVQQLLVCSQEAKKSAYCPYSHFPVGAALLTQEGRIFKGCNIENACYPLGICAERTAIQKAVSEGYKDFRAIAIASDMQDDFISPCGACRQVMREFGTNWPVYMTKPDGTYIVMTVQELLPSSFGPEDLQKTQHHHHHH

SEQ ID NO: 93 - protein, 424 aa, synthetic construct
EVQLVESGGGLVQPGRSLRLSCTASGFTFSDHDMNWVRQAPGKGLEWVGRTRNAAGSYTTEYAASVKGRFTISRDDSKNSLYLQMNSLKTEDTAVYYCAREPKYWIDFDLWGRGTLVTSSGGGGSGGGGSGGGGSDIQMTQSPSSLSASVGDRVTITCRASQSISSYLNWYQQKPGKAPKLLIYAASSLQSGVPSRFSGSGSGTDFTLTISSLQPEDFATYYCQQSYIAPYTFGGGTKVEIKGGGGSGGGGSGGGGSGGGGSGGGGSGGGGSMAQKRPACTLKPECVQQLLVCSQEAKKSAYCPYSHFPVGAALLTQEGRIFKGCNIENACYPLGICAERTAIQKAVSEGYKDFRAIAIASDMQDDFISPCGACRQVMREFGTNWPVYMTKPDGTYIVMTVQELLPSSFGPEDLQKTQHHHHHH

SEQ ID NO: 94 - protein, 429 aa, synthetic construct
EVQLVESGGGLVQPGRSLRLSCTASGFTFSDHDMNWVRQAPGKGLEWVGRTRNAAGSYTTEYAASVKGRFTISRDDSKNSLYLQMNSLKTEDTAVYYCAREPKYWIDFDLWGRGTLVTSSGGGGSGGGGSGGGGSDIQMTQSPSSLSASVGDRVTITCRASQSISSYLNWYQQKPGKAPKLLIYAASSLQSGVPSRFSGSGSGTDFTLTISSLQPEDFATYYCQQSYIAPYTFGGGTKVEIKGGGGSGGGGSGGGGSGGGGSGGGGSGGGGSGGGGSMAQKRPACTLKPECVQQLLVCSQEAKKSAYCPYSHFPVGAALLTQEGRIFKGCNIENACYPLGICAERTAIQKAVSEGYKDFRAIAIASDMQDDFISPCGACRQVMREFGTNWPVYMTKPDGTYIVMTVQELLPSSFGPEDLQKTQHHHHHH

SEQ ID NO: 95 - protein, 434 aa, synthetic construct
EVQLVESGGGLVQPGRSLRLSCTASGFTFSDHDMNWVRQAPGKGLEWVGRTRNAAGSYTTEYAASVKGRFTISRDDSKNSLYLQMNSLKTEDTAVYYCAREPKYWIDFDLWGRGTLVTSSGGGGSGGGGSGGGGSDIQMTQSPSSLSASVGDRVTITCRASQSISSYLNWYQQKPGKAPKLLIYAASSLQSGVPSRFSGSGSGTDFTLTISSLQPEDFATYYCQQSYIAPYTFGGGTKVEIKGGGGSGGGGSGGGGSGGGGSGGGGSGGGGSGGGGSGGGGSMAQKRPACTLKPECVQQLLVCSQEAKKSAYCPYSHFPVGAALLTQEGRIFKGCNIENACYPLGICAERTAIQKAVSEGYKDFRAIAIASDMQDDFISPCGACRQVMREFGTNWPVYMTKPDGTYIVMTVQELLPSSFGPEDLQKTQHHHHHH

SEQ ID NO: 96 - protein, 439 aa, synthetic construct
EVQLVESGGGLVQPGRSLRLSCTASGFTFSDHDMNWVRQAPGKGLEWVGRTRNAAGSYTTEYAASVKGRFTISRDDSKNSLYLQMNSLKTEDTAVYYCAREPKYWIDFDLWGRGTLVTSSGGGGSGGGGSGGGGSDIQMTQSPSSLSASVGDRVTITCRASQSISSYLNWYQQKPGKAPKLLIYAASSLQSGVPSRFSGSGSGTDFTLTISSLQPEDFATYYCQQSYIAPYTFGGGTKVEIKGGGGSGGGGSGGGGSGGGGSGGGGSGGGGSGGGGSGGGGSGGGGSMAQKRPACTLKPECVQQLLVCSQEAKKSAYCPYSHFPVGAALLTQEGRIFKGCNIENACYPLGICAERTAIQKAVSEGYKDFRAIAIASDMQDDFISPCGACRQVMREFGTNWPVYMTKPDGTYIVMTVQELLPSSFGPEDLQKTQHHHHHH

SEQ ID NO: 97 - protein, 444 aa, synthetic construct
EVQLVESGGGLVQPGRSLRLSCTASGFTFSDHDMNWVRQAPGKGLEWVGRTRNAAGSYTTEYAASVKGRFTISRDDSKNSLYLQMNSLKTEDTAVYYCAREPKYWIDFDLWGRGTLVTSSGGGGSGGGGSGGGGSDIQMTQSPSSLSASVGDRVTITCRASQSISSYLNWYQQKPGKAPKLLIYAASSLQSGVPSRFSGSGSGTDFTLTISSLQPEDFATYYCQQSYIAPYTFGGGTKVEIKGGGGSGGGGSGGGGSGGGGSGGGGSGGGGSGGGGSGGGGSGGGGSGGGGSMAQKRPACTLKPECVQQLLVCSQEAKKSAYCPYSHFPVGAALLTQEGRIFKGCNIENACYPLGICAERTAIQKAVSEGYKDFRAIAIASDMQDDFISPCGACRQVMREFGTNWPVYMTKPDGTYIVMTVQELLPSSFGPEDLQKTQHHHHHH

SEQ ID NO: 98 - protein, 449 aa, synthetic construct
EVQLVESGGGLVQPGRSLRLSCTASGFTFSDHDMNWVRQAPGKGLEWVGRTRNAAGSYTTEYAASVKGRFTISRDDSKNSLYLQMNSLKTEDTAVYYCAREPKYWIDFDLWGRGTLVTSSGGGGSGGGGSGGGGSDIQMTQSPSSLSASVGDRVTITCRASQSISSYLNWYQQKPGKAPKLLIYAASSLQSGVPSRFSGSGSGTDFTLTISSLQPEDFATYYCQQSYIAPYTFGGGTKVEIKGGGGSGGGGSGGGGSGGGGSGGGGSGGGGSGGGGSGGGGSGGGGSGGGGSGGGGSMAQKRPACTLKPECVQQLLVCSQEAKKSAYCPYSHFPVGAALLTQEGRIFKGCNIENACYPLGICAERTAIQKAVSEGYKDFRAIAIASDMQDDFISPCGACRQVMREFGTNWPVYMTKPDGTYIVMTVQELLPSSFGPEDLQKTQHHHHHH

SEQ ID NO: 99 - protein, 454 aa, synthetic construct
EVQLVESGGGLVQPGRSLRLSCTASGFTFSDHDMNWVRQAPGKGLEWVGRTRNAAGSYTTEYAASVKGRFTISRDDSKNSLYLQMNSLKTEDTAVYYCAREPKYWIDFDLWGRGTLVTSSGGGGSGGGGSGGGGSDIQMTQSPSSLSASVGDRVTITCRASQSISSYLNWYQQKPGKAPKLLIYAASSLQSGVPSRFSGSGSGTDFTLTISSLQPEDFATYYCQQSYIAPYTFGGGTKVEIKGGGGSGGGGSGGGGSGGGGSGGGGSGGGGSGGGGSGGGGSGGGGSGGGGSGGGGSGGGGSMAQKRPACTLKPECVQQLLVCSQEAKKSAYCPYSHFPVGAALLTQEGRIFKGCNIENACYPLGICAERTAIQKAVSEGYKDFRAIAIASDMQDDFISPCGACRQVMREFGTNWPVYMTKPDGTYIVMTVQELLPSSFGPEDLQKTQHHHHHH

SEQ ID NO: 100 - protein, 399 aa, synthetic construct
DIQMTQSPSSLSASVGDRVTITCRASQSISSYLNWYQQKPGKAPKLLIYAASSLQSGVPSRFSGSGSGTDFTLTISSLQPEDFATYYCQQSYIAPYIFGGGTKVEIKGGGGSGGGGSGGGGSEVQLVESGGGLVQPGGSLRLSCAASGETFVDHDMDWVRQAPGKGLEWVGRTRNKLGSYTTEYAASVKGRETGRDDSKNSLYLQMNSLKTEDTAVYYCAREPKYWIDFDLWGRGTLVTVSSGGGGSMAQKRPACTLKPECVQQLLVCSQEAKKSAYCPYSHFPVGAALLTQEGRIFKGCNIENACYPLGICAERTAIQKAVSEGYKDFRAIAIASDMQDDFISPCGACRQVMREFGTNWPVYMTKPDGTYIVMTVQELLPSSFGPEDLQKTQHHHHHH

SEQ ID NO: 101 - protein, 409 aa, synthetic construct
DIQMTQSPSSLSASVGDRVTITCRASQSISSYLNWYQQKPGKAPKLLIYAASSLQSGVPSRFSGSGSGTDFTLTISSLQPEDFATYYCQQSYIAPYIFGGGTKVEIKGGGGSGGGGSGGGGSEVQLVESGGGLVQPGGSLRLSCAASGETFVDHDMDWVRQAPGKGLEWVGRTRNKLGSYTTEYAASVKGRETGRDDSKNSLYLQMNSLKTEDTAVYYCAREPKYWIDFDLWGRGTLVTVSSGGGGSGGGGSGGGGSMAQKRPACTLKPECVQQLLVCSQEAKKSAYCPYSHFPVGAALLTQEGRIFKGCNIENACYPLGICAERTAIQKAVSEGYKDFRAIAIASDMQDDFISPCGACRQVMREFGTNWPVYMTKPDGTYIVMTVQELLPSSFGPEDLQKTQHHHHHH

SEQ ID NO: 102 - protein, 414 aa, synthetic construct
DIQMTQSPSSLSASVGDRVTITCRASQSISSYLNWYQQKPGKAPKLLIYAASSLQSGVPSRFSGSGSGTDFTLTISSLQPEDFATYYCQQSYIAPYIFGGGTKVEIKGGGGSGGGGSGGGGSEVQLVESGGGLVQPGGSLRLSCAASGETFVDHDMDWVRQAPGKGLEWVGRTRNKLGSYTTEYAASVKGRETGRDDSKNSLYLQMNSLKTEDTAVYYCAREPKYWIDFDLWGRGTLVTVSSGGGGSGGGGSGGGGSGGGGSMAQKRPACTLKPECVQQLLVCSQEAKKSAYCPYSHFPVGAALLTQEGRIFKGCNIENACYPLGICAERTAIQKAVSEGYKDFRAIAIASDMQDDFISPCGACRQVMREFGTNWPVYMTKPDGTYIVMTVQELLPSSFGPEDLQKTQHHHHHH

SEQ ID NO: 103 - protein, 419 aa, synthetic construct
DIQMTQSPSSLSASVGDRVTITCRASQSISSYLNWYQQKPGKAPKLLIYAASSLQSGVPSRFSGSGSGTDFTLTISSLQPEDFATYYCQQSYIAPYIFGGGTKVEIKGGGGSGGGGSGGGGSEVQLVESGGGLVQPGGSLRLSCAASGETFVDHDMDWVRQAPGKGLEWVGRTRNKLGSYTTEYAASVKGRETGRDDSKNSLYLQMNSLKTEDTAVYYCAREPKYWIDFDLWGRGTLVTVSSGGGGSGGGGSGGGGSGGGGSGGGGSMAQKRPACTLKPECVQQLLVCSQEAKKSAYCPYSHFPVGAALLTQEGRIFKGCNIENACYPLGICAERTAIQKAVSEGYKDFRAIAIASDMQDDFISPCGACRQVMREFGTNWPVYMTKPDGTYIVMTVQELLPSSFGPEDLQKTQHHHHHH

SEQ ID NO: 104 - protein, 424 aa, synthetic construct
DIQMTQSPSSLSASVGDRVTITCRASQSISSYLNWYQQKPGKAPKLLIYAASSLQSGVPSRFSGSGSGTDFTLTISSLQPEDFATYYCQQSYIAPYIFGGGTKVEIKGGGGSGGGGSGGGGSEVQLVESGGGLVQPGGSLRLSCAASGETFVDHDMDWVRQAPGKGLEWVGRTRNKLGSYTTEYAASVKGRETGRDDSKNSLYLQMNSLKTEDTAVYYCAREPKYWIDFDLWGRGTLVTVSSGGGGSGGGGSGGGGSGGGGSGGGGSGGGGSMAQKRPACTLKPECVQQLLVCSQEAKKSAYCPYSHFPVGAALLTQEGRIFKGCNIENACYPLGICAERTAIQKAVSEGYKDFRAIAIASDMQDDFISPCGACRQVMREFGTNWPVYMTKPDGTYIVMTVQELLPSSFGPEDLQKTQHHHHHH

SEQ ID NO: 105 - protein, 429 aa, synthetic construct
DIQMTQSPSSLSASVGDRVTITCRASQSISSYLNWYQQKPGKAPKLLIYAASSLQSGVPSRFSGSGSGTDFTLTISSLQPEDFATYYCQQSYIAPYIFGGGTKVEIKGGGGSGGGGSGGGGSEVQLVESGGGLVQPGGSLRLSCAASGETFVDHDMDWVRQAPGKGLEWVGRTRNKLGSYTTEYAASVKGRETGRDDSKNSLYLQMNSLKTEDTAVYYCAREPKYWIDFDLWGRGTLVTVSSGGGGSGGGGSGGGGSGGGGSGGGGSGGGGSGGGGSMAQKRPACTLKPECVQQLLVCSQEAKKSAYCPYSHFPVGAALLTQEGRIFKGCNIENACYPLGICAERTAIQKAVSEGYKDFRAIAIASDMQDDFISPCGACRQVMREFGTNWPVYMTKPDGTYIVMTVQELLPSSFGPEDLQKTQHHHHHH

SEQ ID NO: 106 - protein, 434 aa, synthetic construct
DIQMTQSPSSLSASVGDRVTITCRASQSISSYLNWYQQKPGKAPKLLIYAASSLQSGVPSRFSGSGSGTDFTLTISSLQPEDFATYYCQQSYIAPYIFGGGTKVEIKGGGGSGGGGSGGGGSEVQLVESGGGLVQPGGSLRLSCAASGETFVDHDMDWVRQAPGKGLEWVGRTRNKLGSYTTEYAASVKGRETGRDDSKNSLYLQMNSLKTEDTAVYYCAREPKYWIDFDLWGRGTLVTVSSGGGGSGGGGSGGGGSGGGGSGGGGSGGGGSGGGGSGGGGSMAQKRPACTLKPECVQQLLVCSQEAKKSAYCPYSHFPVGAALLTQEGRIFKGCNIENACYPLGICAERTAIQKAVSEGYKDFRAIAIASDMQDDFISPCGACRQVMREFGTNWPVYMTKPDGTYIVMTVQELLPSSFGPEDLQKTQHHHHHH

SEQ ID NO: 107 - protein, 439 aa, synthetic construct
DIQMTQSPSSLSASVGDRVTITCRASQSISSYLNWYQQKPGKAPKLLIYAASSLQSGVPSRFSGSGSGTDFTLTISSLQPEDFATYYCQQSYIAPYIFGGGTKVEIKGGGGSGGGGSGGGGSEVQLVESGGGLVQPGGSLRLSCAASGETFVDHDMDWVRQAPGKGLEWVGRTRNKLGSYTTEYAASVKGRETGRDDSKNSLYLQMNSLKTEDTAVYYCAREPKYWIDFDLWGRGTLVTVSSGGGGSGGGGSGGGGSGGGGSGGGGSGGGGSGGGGSGGGGSGGGGSMAQKRPACTLKPECVQQLLVCSQEAKKSAYCPYSHFPVGAALLTQEGRIFKGCNIENACYPLGICAERTAIQKAVSEGYKDFRAIAIASDMQDDFISPCGACRQVMREFGTNWPVYMTKPDGTYIVMTVQELLPSSFGPEDLQKTQHHHHHH

SEQ ID NO: 108 - protein, 444 aa, synthetic construct
DIQMTQSPSSLSASVGDRVTITCRASQSISSYLNWYQQKPGKAPKLLIYAASSLQSGVPSRFSGSGSGTDFTLTISSLQPEDFATYYCQQSYIAPYIFGGGTKVEIKGGGGSGGGGSGGGGSEVQLVESGGGLVQPGGSLRLSCAASGETFVDHDMDWVRQAPGKGLEWVGRTRNKLGSYTTEYAASVKGRETGRDDSKNSLYLQMNSLKTEDTAVYYCAREPKYWIDFDLWGRGTLVTVSSGGGGSGGGGSGGGGSGGGGSGGGGSGGGGSGGGGSGGGGSGGGGSGGGGSMAQKRPACTLKPECVQQLLVCSQEAKKSAYCPYSHFPVGAALLTQEGRIFKGCNIENACYPLGICAERTAIQKAVSEGYKDFRAIAIASDMQDDFISPCGACRQVMREFGTNWPVYMTKPDGTYIVMTVQELLPSSFGPEDLQKTQHHHHHH

SEQ ID NO: 109 - protein, 449 aa, synthetic construct
DIQMTQSPSSLSASVGDRVTITCRASQSISSYLNWYQQKPGKAPKLLIYAASSLQSGVPSRFSGSGSGTDFTLTISSLQPEDFATYYCQQSYIAPYIFGGGTKVEIKGGGGSGGGGSGGGGSEVQLVESGGGLVQPGGSLRLSCAASGETFVDHDMDWVRQAPGKGLEWVGRTRNKLGSYTTEYAASVKGRETGRDDSKNSLYLQMNSLKTEDTAVYYCAREPKYWIDFDLWGRGTLVTVSSGGGGSGGGGSGGGGSGGGGSGGGGSGGGGSGGGGSGGGGSGGGGSGGGGSGGGGSMAQKRPACTLKPECVQQLLVCSQEAKKSAYCPYSHFPVGAALLTQEGRIFKGCNIENACYPLGICAERTAIQKAVSEGYKDFRAIAIASDMQDDFISPCGACRQVMREFGTNWPVYMTKPDGTYIVMTVQELLPSSFGPEDLQKTQHHHHHH

SEQ ID NO: 110 - protein, 454 aa, synthetic construct
DIQMTQSPSSLSASVGDRVTITCRASQSISSYLNWYQQKPGKAPKLLIYAASSLQSGVPSRFSGSGSGTDFTLTISSLQPEDFATYYCQQSYIAPYIFGGGTKVEIKGGGGSGGGGSGGGGSEVQLVESGGGLVQPGGSLRLSCAASGETFVDHDMDWVRQAPGKGLEWVGRTRNKLGSYTTEYAASVKGRETGRDDSKNSLYLQMNSLKTEDTAVYYCAREPKYWIDFDLWGRGTLVTVSSGGGGSGGGGSGGGGSGGGGSGGGGSGGGGSGGGGSGGGGSGGGGSGGGGSGGGGSGGGGSMAQKRPACTLKPECVQQLLVCSQEAKKSAYCPYSHFPVGAALLTQEGRIFKGCNIENACYPLGICAERTAIQKAVSEGYKDFRAIAIASDMQDDFISPCGACRQVMREFGTNWPVYMTKPDGTYIVMTVQELLPSSFGPEDLQKTQHHHHHH

SEQ ID NO: 111 - protein, 403 aa, synthetic construct
MAQKRPACTLKPECVQQLLVCSQEAKKSAYCPYSHFPVGAALLTQEGRIFKGCNIENACYPLGICAERTAIQKAVSEGYKDFRAIAIASDMQDDFISPCGACRQVMREFGTNWPVYMTKPDGTYIVMTVQELLPSSFGPEDLQKTQGGGGSDIQMTQSPSSVSASVGDRVTITCRASQGISSWLAWYQQKPGKAPKLLLIYAASSLQSGVPSRFSGSGSGTDFTLTISSLQPEDFATYYCQQTNSFPYTFGGGTKVEIKGGGGSGGGGSGGGGSEVQLLESGGGLVQPGGSLRLSCAASGETFSNYAMSWVRQAPGKGLEWVSAISGSGGSTYYADSVKGRFTISRDNSKNTLYLQMNSLRAEDTAVYYCAKGPPTYHTNYYYMDVWGKGTTVTVSSHHHHHH

SEQ ID NO: 112 - protein, 403 aa, synthetic construct
MAQKRPACTLKPECVQQLLVCSQEAKKSAYCPYSHFPVGAALLTQEGRIFKGCNIENACYPLGICAERTAIQKAVSEGYKDFRAIAIASDMQDDFISPCGACRQVMREFGTNWPVYMTKPDGTYIVMTVQELLPSSFGPEDLQKTQGGGGSDIQMTQSPSSVSASVGDRVTITCRASQGISSWLAWYQQKPGKAPKLLIYAASSLOQSGVPSRFSGSGSGTDFTLTISSLQPEDFATYYCQQTNSEPYTFGGGTKVEIKGGGGSGGGGSGGGGSEVQLLESGGGLVQPGGSLRLSCAASGETESSYVMIWVRQAPGKGLEWVSSISGDSVTTYYADSVKGRFTISRDNSKNTLYLOMNSLRAEDTAVYYCAKGPPTYHTNYYYMDVWGKGTTVTVSSHHHHHH

SEQ ID NO: 113 - protein, 422 aa, synthetic construct
MAQKRPACTLKPECVQQLLVCSQEAKKSAYCPYSHFPVGAALLTQEGRIFKGCNIENACYPLGICAERTAIQKAVSEGYKDFRAIAIASDMQDDFISPCGACRQVMREFGTNWPVYMTKPDGTYIVMTVQELLPSSFGPEDLQKTQGGGGSDIQMTQSPSSLSASVGDRVTITCRASQSISSYLNWYQQKPGKAPKLLIYAASSLQSGVPSRFSGSGSGTDFTLTISSLQPEDFATYYCQQSYIAPYTFGGGTKVEIKGGGGSGGGGSGGGGSEVQLVESGGGLVQPGGSLRLSCAASGETFSDHYMDWVRQAPGKGLASGETFSDHYMDWVRQAPGKGLEWVGRIRNKASSYTTEYAASVKGRFTISRDDSKNSLYLQMNSLKTEDTAVYYCAREPKYWIDFDLWGRGTLVTVSSHHHHHH

SEQ ID NO: 114 - protein, 399 aa, synthetic construct
MAQKRPACTLKPECVQQLLVCSQEAKKSAYCPYSHFPVGAALLTQEGRIFKGCNIENACYPLGICAERTAIQKAVSEGYKDFRAIAIASDMQDDFISPCGACRQVMREFGTNWPVYMTKPDGTYIVMTVQELLPSSFGPEDLQKTQGGGGSDIQMTQSPSSLSASVGDRVTITCRASQSISSYLNWYQQKPGKAPKLLIYAASSLQSGVPSRFSGSGSGTDFTLTISSLQPEDFATYYCQQSYIAPYTFGGGTKVEIKGGGGSGGGGSGGGGSEVQLVESGGGLVQPGRSLRLSCTASGFTFSDHDMNWVRQAPGKGLEWVGRTRNAAGSYTTEYAASVKGRFTISRDDSKNSLYLQMNSLKTEDTAVYYCAREPKYWIDFDLWGRGTLVTSSHHHHHH

SEQ ID NO: 115 - protein, 399 aa, synthetic construct
MAQKRPACTLKPECVQQLLVCSQEAKKSAYCPYSHFPVGAALLTQEGRIFKGCNIENACYPLGICAERTAIQKAVSEGYKDFRAIAIASDMQDDFISPCGACRQVMREFGTNWPVYMTKPDGTYIVMTVQELLPSSFGPEDLQKTQGGGGSEVQLVESGGGLVQPGGSLRLSCAASGETFVDHDMDWVRQAPGKGLEWVGRTRNKLGSYTTEYAASVKGRETGRDDSKNSLYLQMNSLKTEDTAVYYCAREPKYWIDFDLWGRGTLVTVSSGGGGSGGGGSGGGGSDIQMTQSPSSLSASVGDRVTITCRASQSISSYLNWYQQKPGKAPKLLIYAASSLQSGVPSRFSGSGSGTDFTLTISSLQPEDFATYYCQQSYIAPYIFGGGTKVEIKHHHHHH

SEQ ID NO: 116 - protein, 413 aa, synthetic construct
MAQKRPACTLKPECVQQLLVCSQEAKKSAYCPYSHFPVGAALLTQEGRIFKGCNIENACYPLGICAERTAIQKAVSEGYKDFRAIAIASDMQDDFISPCGACRQVMREFGTNWPVYMTKPDGTYIVMTVQELLPSSFGPEDLQKTQGGGGSGGGGSGGGGSDIQMTQSPSSVSASVGDRVTITCRASQGISSWLAWYQQKPGKAPKLLLIYAASSLQSGVPSRFSGSGSGTDFTLTISSLQPEDFATYYCQQTNSFPYTFGGGTKVEIKGGGGSGGGGSGGGGSEVQLLESGGGLVQPGGSLRLSCAASGETFSNYAMSWVRQAPGKGLEWVSAISGSGGSTYYADSVKGRFTISRDNSKNTLYLQMNSLRAEDTAVYYCAKGPPTYHTNYYYMDVWGKGTTVTVSSHHHHHH

SEQ ID NO: 117 - protein, 413 aa, synthetic construct
MAQKRPACTLKPECVQQLLVCSQEAKKSAYCPYSHFPVGAALLTQEGRIFKGCNIENACYPLGICAERTAIQKAVSEGYKDFRAIAIASDMQDDFISPCGACRQVMREFGTNWPVYMTKPDGTYIVMTVQELLPSSFGPEDLQKTQGGGGSGGGGSGGGGSDIQMTQSPSSVSASVGDRVTITCRASQGISSWLAWYQQKPGKAPKLLIYAASSLOQSGVPSRFSGSGSGTDFTLTISSLQPEDFATYYCQQTNSEPYTFGGGTKVEIKGGGGSGGGGSGGGGSEVQLLESGGGLVQPGGSLRLSCAASGETESSYVMIWVRQAPGKGLEWVSSISGDSVTTYYADSVKGRFTISRDNSKNTLYLOMNSLRAEDTAVYYCAKGPPTYHTNYYYMDVWGKGTTVTVSSHHHHHH

SEQ ID NO: 118 - protein, 432 aa, synthetic construct
MAQKRPACTLKPECVQQLLVCSQEAKKSAYCPYSHFPVGAALLTQEGRIFKGCNIENACYPLGICAERTAIQKAVSEGYKDFRAIAIASDMQDDFISPCGACRQVMREFGTNWPVYMTKPDGTYIVMTVQELLPSSFGPEDLQKTQGGGGSGGGGSGGGGSDIQMTQSPSSLSASVGDRVTITCRASQSISSYLNWYQQKPGKAPKLLIYAASSLQSGVPSRFSGSGSGTDFTLTISSLQPEDFATYYCQQSYIAPYTFGGGTKVEIKGGGGSGGGGSGGGGSEVQLVESGGGLVQPGGSLRLSCAASGETFSDHYMDWVRQAPGKGLASGETFSDHYMDWVRQAPGKGLEWVGRIRNKASSYTTEYAASVKGRFTISRDDSKNSLYLQMNSLKTEDTAVYYCAREPKYWIDFDLWGRGTLVTVSSHHHHHH

SEQ ID NO: 119 - protein, 409 aa, synthetic construct
MAQKRPACTLKPECVQQLLVCSQEAKKSAYCPYSHFPVGAALLTQEGRIFKGCNIENACYPLGICAERTAIQKAVSEGYKDFRAIAIASDMQDDFISPCGACRQVMREFGTNWPVYMTKPDGTYIVMTVQELLPSSFGPEDLQKTQGGGGSGGGGSGGGGSDIQMTQSPSSLSASVGDRVTITCRASQSISSYLNWYQQKPGKAPKLLIYAASSLQSGVPSRFSGSGSGTDFTLTISSLQPEDFATYYCQQSYIAPYTFGGGTKVEIKGGGGSGGGGSGGGGSEVQLVESGGGLVQPGRSLRLSCTASGFTFSDHDMNWVRQAPGKGLEWVGRTRNAAGSYTTEYAASVKGRFTISRDDSKNSLYLQMNSLKTEDTAVYYCAREPKYWIDFDLWGRGTLVTSSHHHHHH

SEQ ID NO: 120 - protein, 409 aa, synthetic construct
MAQKRPACTLKPECVQQLLVCSQEAKKSAYCPYSHFPVGAALLTQEGRIFKGCNIENACYPLGICAERTAIQKAVSEGYKDFRAIAIASDMQDDFISPCGACRQVMREFGTNWPVYMTKPDGTYIVMTVQELLPSSFGPEDLQKTQGGGGSGGGGSGGGGSEVQLVESGGGLVQPGGSLRLSCAASGETFVDHDMDWVRQAPGKGLEWVGRTRNKLGSYTTEYAASVKGRETGRDDSKNSLYLQMNSLKTEDTAVYYCAREPKYWIDFDLWGRGTLVTVSSGGGGSGGGGSGGGGSDIQMTQSPSSLSASVGDRVTITCRASQSISSYLNWYQQKPGKAPKLLIYAASSLQSGVPSRFSGSGSGTDFTLTISSLQPEDFATYYCQQSYIAPYIFGGGTKVEIKHHHHHH

SEQ ID NO: 121 - protein, 418 aa, synthetic construct
MAQKRPACTLKPECVQQLLVCSQEAKKSAYCPYSHFPVGAALLTQEGRIFKGCNIENACYPLGICAERTAIQKAVSEGYKDFRAIAIASDMQDDFISPCGACRQVMREFGTNWPVYMTKPDGTYIVMTVQELLPSSFGPEDLQKTQGGGGSGGGGSGGGGSGGGGSDIQMTQSPSSVSASVGDRVTITCRASQGISSWLAWYQQKPGKAPKLLLIYAASSLQSGVPSRFSGSGSGTDFTLTISSLQPEDFATYYCQQTNSFPYTFGGGTKVEIKGGGGSGGGGSGGGGSEVQLLESGGGLVQPGGSLRLSCAASGETFSNYAMSWVRQAPGKGLEWVSAISGSGGSTYYADSVKGRFTISRDNSKNTLYLQMNSLRAEDTAVYYCAKGPPTYHTNYYYMDVWGKGTTVTVSSHHHHHH

SEQ ID NO: 122 - protein, 418 aa, synthetic construct
MAQKRPACTLKPECVQQLLVCSQEAKKSAYCPYSHFPVGAALLTQEGRIFKGCNIENACYPLGICAERTAIQKAVSEGYKDFRAIAIASDMQDDFISPCGACRQVMREFGTNWPVYMTKPDGTYIVMTVQELLPSSFGPEDLQKTQGGGGSGGGGSGGGGSGGGGSDIQMTQSPSSVSASVGDRVTITCRASQGISSWLAWYQQKPGKAPKLLIYAASSLOQSGVPSRFSGSGSGTDFTLTISSLQPEDFATYYCQQTNSEPYTFGGGTKVEIKGGGGSGGGGSGGGGSEVQLLESGGGLVQPGGSLRLSCAASGETESSYVMIWVRQAPGKGLEWVSSISGDSVTTYYADSVKGRFTISRDNSKNTLYLOMNSLRAEDTAVYYCAKGPPTYHTNYYYMDVWGKGTTVTVSSHHHHHH

SEQ ID NO: 123 - protein, 437 aa, synthetic construct
MAQKRPACTLKPECVQQLLVCSQEAKKSAYCPYSHFPVGAALLTQEGRIFKGCNIENACYPLGICAERTAIQKAVSEGYKDFRAIAIASDMQDDFISPCGACRQVMREFGTNWPVYMTKPDGTYIVMTVQELLPSSFGPEDLQKTQGGGGSGGGGSGGGGSGGGGSDIQMTQSPSSLSASVGDRVTITCRASQSISSYLNWYQQKPGKAPKLLIYAASSLQSGVPSRFSGSGSGTDFTLTISSLQPEDFATYYCQQSYIAPYTFGGGTKVEIKGGGGSGGGGSGGGGSEVQLVESGGGLVQPGGSLRLSCAASGETFSDHYMDWVRQAPGKGLASGETFSDHYMDWVRQAPGKGLEWVGRIRNKASSYTTEYAASVKGRFTISRDDSKNSLYLQMNSLKTEDTAVYYCAREPKYWIDFDLWGRGTLVTVSSHHHHHH

SEQ ID NO: 124 - protein, 414 aa, synthetic construct
MAQKRPACTLKPECVQQLLVCSQEAKKSAYCPYSHFPVGAALLTQEGRIFKGCNIENACYPLGICAERTAIQKAVSEGYKDFRAIAIASDMQDDFISPCGACRQVMREFGTNWPVYMTKPDGTYIVMTVQELLPSSFGPEDLQKTQGGGGSGGGGSGGGGSGGGGSDIQMTQSPSSLSASVGDRVTITCRASQSISSYLNWYQQKPGKAPKLLIYAASSLQSGVPSRFSGSGSGTDFTLTISSLQPEDFATYYCQQSYIAPYTFGGGTKVEIKGGGGSGGGGSGGGGSEVQLVESGGGLVQPGRSLRLSCTASGFTFSDHDMNWVRQAPGKGLEWVGRTRNAAGSYTTEYAASVKGRFTISRDDSKNSLYLQMNSLKTEDTAVYYCAREPKYWIDFDLWGRGTLVTSSHHHHHH

SEQ ID NO: 125 - protein, 414 aa, synthetic construct
MAQKRPACTLKPECVQQLLVCSQEAKKSAYCPYSHFPVGAALLTQEGRIFKGCNIENACYPLGICAERTAIQKAVSEGYKDFRAIAIASDMQDDFISPCGACRQVMREFGTNWPVYMTKPDGTYIVMTVQELLPSSFGPEDLQKTQGGGGSGGGGSGGGGSGGGGSEVQLVESGGGLVQPGGSLRLSCAASGETFVDHDMDWVRQAPGKGLEWVGRTRNKLGSYTTEYAASVKGRETGRDDSKNSLYLQMNSLKTEDTAVYYCAREPKYWIDFDLWGRGTLVTVSSGGGGSGGGGSGGGGSDIQMTQSPSSLSASVGDRVTITCRASQSISSYLNWYQQKPGKAPKLLIYAASSLQSGVPSRFSGSGSGTDFTLTISSLQPEDFATYYCQQSYIAPYIFGGGTKVEIKHHHHHH

SEQ ID NO: 126 - protein, 423 aa, synthetic construct
MAQKRPACTLKPECVQQLLVCSQEAKKSAYCPYSHFPVGAALLTQEGRIFKGCNIENACYPLGICAERTAIQKAVSEGYKDFRAIAIASDMQDDFISPCGACRQVMREFGTNWPVYMTKPDGTYIVMTVQELLPSSFGPEDLQKTQGGGGSGGGGSGGGGSGGGGSGGGGSDIQMTQSPSSVSASVGDRVTITCRASQGISSWLAWYQQKPGKAPKLLLIYAASSLQSGVPSRFSGSGSGTDFTLTISSLQPEDFATYYCQQTNSFPYTFGGGTKVEIKGGGGSGGGGSGGGGSEVQLLESGGGLVQPGGSLRLSCAASGETFSNYAMSWVRQAPGKGLEWVSAISGSGGSTYYADSVKGRFTISRDNSKNTLYLQMNSLRAEDTAVYYCAKGPPTYHTNYYYMDVWGKGTTVTVSSHHHHHH

SEQ ID NO: 127 - protein, 423 aa, synthetic construct
MAQKRPACTLKPECVQQLLVCSQEAKKSAYCPYSHFPVGAALLTQEGRIFKGCNIENACYPLGICAERTAIQKAVSEGYKDFRAIAIASDMQDDFISPCGACRQVMREFGTNWPVYMTKPDGTYIVMTVQELLPSSFGPEDLQKTQGGGGSGGGGSGGGGSGGGGSGGGGSDIQMTQSPSSVSASVGDRVTITCRASQGISSWLAWYQQKPGKAPKLLIYAASSLOQSGVPSRFSGSGSGTDFTLTISSLQPEDFATYYCQQTNSEPYTFGGGTKVEIKGGGGSGGGGSGGGGSEVQLLESGGGLVQPGGSLRLSCAASGETESSYVMIWVRQAPGKGLEWVSSISGDSVTTYYADSVKGRFTISRDNSKNTLYLOMNSLRAEDTAVYYCAKGPPTYHTNYYYMDVWGKGTTVTVSSHHHHHH

SEQ ID NO: 128 - protein, 442 aa, synthetic construct
MAQKRPACTLKPECVQQLLVCSQEAKKSAYCPYSHFPVGAALLTQEGRIFKGCNIENACYPLGICAERTAIQKAVSEGYKDFRAIAIASDMQDDFISPCGACRQVMREFGTNWPVYMTKPDGTYIVMTVQELLPSSFGPEDLQKTQGGGGSGGGGSGGGGSGGGGSGGGGSDIQMTQSPSSLSASVGDRVTITCRASQSISSYLNWYQQKPGKAPKLLIYAASSLQSGVPSRFSGSGSGTDFTLTISSLQPEDFATYYCQQSYIAPYTFGGGTKVEIKGGGGSGGGGSGGGGSEVQLVESGGGLVQPGGSLRLSCAASGETFSDHYMDWVRQAPGKGLASGETFSDHYMDWVRQAPGKGLEWVGRIRNKASSYTTEYAASVKGRFTISRDDSKNSLYLQMNSLKTEDTAVYYCAREPKYWIDFDLWGRGTLVTVSSHHHHHH

SEQ ID NO: 129 - protein, 419 aa, synthetic construct
MAQKRPACTLKPECVQQLLVCSQEAKKSAYCPYSHFPVGAALLTQEGRIFKGCNIENACYPLGICAERTAIQKAVSEGYKDFRAIAIASDMQDDFISPCGACRQVMREFGTNWPVYMTKPDGTYIVMTVQELLPSSFGPEDLQKTQGGGGSGGGGSGGGGSGGGGSGGGGSDIQMTQSPSSLSASVGDRVTITCRASQSISSYLNWYQQKPGKAPKLLIYAASSLQSGVPSRFSGSGSGTDFTLTISSLQPEDFATYYCQQSYIAPYTFGGGTKVEIKGGGGSGGGGSGGGGSEVQLVESGGGLVQPGRSLRLSCTASGFTFSDHDMNWVRQAPGKGLEWVGRTRNAAGSYTTEYAASVKGRFTISRDDSKNSLYLQMNSLKTEDTAVYYCAREPKYWIDFDLWGRGTLVTSSHHHHHH

SEQ ID NO: 130 - protein, 419 aa, synthetic construct
MAQKRPACTLKPECVQQLLVCSQEAKKSAYCPYSHFPVGAALLTQEGRIFKGCNIENACYPLGICAERTAIQKAVSEGYKDFRAIAIASDMQDDFISPCGACRQVMREFGTNWPVYMTKPDGTYIVMTVQELLPSSFGPEDLQKTQGGGGSGGGGSGGGGSGGGGSGGGGSEVQLVESGGGLVQPGGSLRLSCAASGETFVDHDMDWVRQAPGKGLEWVGRTRNKLGSYTTEYAASVKGRETGRDDSKNSLYLQMNSLKTEDTAVYYCAREPKYWIDFDLWGRGTLVTVSSGGGGSGGGGSGGGGSDIQMTQSPSSLSASVGDRVTITCRASQSISSYLNWYQQKPGKAPKLLIYAASSLQSGVPSRFSGSGSGTDFTLTISSLQPEDFATYYCQQSYIAPYIFGGGTKVEIKHHHHHH

SEQ ID NO: 131 - protein, 428 aa, synthetic construct
MAQKRPACTLKPECVQQLLVCSQEAKKSAYCPYSHFPVGAALLTQEGRIFKGCNIENACYPLGICAERTAIQKAVSEGYKDFRAIAIASDMQDDFISPCGACRQVMREFGTNWPVYMTKPDGTYIVMTVQELLPSSFGPEDLQKTQGGGGSGGGGSGGGGSGGGGSGGGGSGGGGSDIQMTQSPSSVSASVGDRVTITCRASQGISSWLAWYQQKPGKAPKLLLIYAASSLQSGVPSRFSGSGSGTDFTLTISSLQPEDFATYYCQQTNSFPYTFGGGTKVEIKGGGGSGGGGSGGGGSEVQLLESGGGLVQPGGSLRLSCAASGETFSNYAMSWVRQAPGKGLEWVSAISGSGGSTYYADSVKGRFTISRDNSKNTLYLQMNSLRAEDTAVYYCAKGPPTYHTNYYYMDVWGKGTTVTVSSHHHHHH

SEQ ID NO: 132 - protein, 428 aa, synthetic construct
MAQKRPACTLKPECVQQLLVCSQEAKKSAYCPYSHFPVGAALLTQEGRIFKGCNIENACYPLGICAERTAIQKAVSEGYKDFRAIAIASDMQDDFISPCGACRQVMREFGTNWPVYMTKPDGTYIVMTVQELLPSSFGPEDLQKTQGGGGSGGGGSGGGGSGGGGSGGGGSGGGGSDIQMTQSPSSVSASVGDRVTITCRASQGISSWLAWYQQKPGKAPKLLIYAASSLOQSGVPSRFSGSGSGTDFTLTISSLQPEDFATYYCQQTNSEPYTFGGGTKVEIKGGGGSGGGGSGGGGSEVQLLESGGGLVQPGGSLRLSCAASGETESSYVMIWVRQAPGKGLEWVSSISGDSVTTYYADSVKGRFTISRDNSKNTLYLOMNSLRAEDTAVYYCAKGPPTYHTNYYYMDVWGKGTTVTVSSHHHHHH

SEQ ID NO: 133 - protein, 447 aa, synthetic construct
MAQKRPACTLKPECVQQLLVCSQEAKKSAYCPYSHFPVGAALLTQEGRIFKGCNIENACYPLGICAERTAIQKAVSEGYKDFRAIAIASDMQDDFISPCGACRQVMREFGTNWPVYMTKPDGTYIVMTVQELLPSSFGPEDLQKTQGGGGSGGGGSGGGGSGGGGSGGGGSGGGGSDIQMTQSPSSLSASVGDRVTITCRASQSISSYLNWYQQKPGKAPKLLIYAASSLQSGVPSRFSGSGSGTDFTLTISSLQPEDFATYYCQQSYIAPYTFGGGTKVEIKGGGGSGGGGSGGGGSEVQLVESGGGLVQPGGSLRLSCAASGETFSDHYMDWVRQAPGKGLASGETFSDHYMDWVRQAPGKGLEWVGRIRNKASSYTTEYAASVKGRFTISRDDSKNSLYLQMNSLKTEDTAVYYCAREPKYWIDFDLWGRGTLVTVSSHHHHHH

SEQ ID NO: 134 - protein, 424 aa, synthetic construct
MAQKRPACTLKPECVQQLLVCSQEAKKSAYCPYSHFPVGAALLTQEGRIFKGCNIENACYPLGICAERTAIQKAVSEGYKDFRAIAIASDMQDDFISPCGACRQVMREFGTNWPVYMTKPDGTYIVMTVQELLPSSFGPEDLQKTQGGGGSGGGGSGGGGSGGGGSGGGGSGGGGSDIQMTQSPSSLSASVGDRVTITCRASQSISSYLNWYQQKPGKAPKLLIYAASSLQSGVPSRFSGSGSGTDFTLTISSLQPEDFATYYCQQSYIAPYTFGGGTKVEIKGGGGSGGGGSGGGGSEVQLVESGGGLVQPGRSLRLSCTASGFTFSDHDMNWVRQAPGKGLEWVGRTRNAAGSYTTEYAASVKGRFTISRDDSKNSLYLQMNSLKTEDTAVYYCAREPKYWIDFDLWGRGTLVTSSHHHHHH

SEQ ID NO: 135 - protein, 424 aa, synthetic construct
MAQKRPACTLKPECVQQLLVCSQEAKKSAYCPYSHFPVGAALLTQEGRIFKGCNIENACYPLGICAERTAIQKAVSEGYKDFRAIAIASDMQDDFISPCGACRQVMREFGTNWPVYMTKPDGTYIVMTVQELLPSSFGPEDLQKTQGGGGSGGGGSGGGGSGGGGSGGGGSGGGGSEVQLVESGGGLVQPGGSLRLSCAASGETFVDHDMDWVRQAPGKGLEWVGRTRNKLGSYTTEYAASVKGRETGRDDSKNSLYLQMNSLKTEDTAVYYCAREPKYWIDFDLWGRGTLVTVSSGGGGSGGGGSGGGGSDIQMTQSPSSLSASVGDRVTITCRASQSISSYLNWYQQKPGKAPKLLIYAASSLQSGVPSRFSGSGSGTDFTLTISSLQPEDFATYYCQQSYIAPYIFGGGTKVEIKHHHHHH

SEQ ID NO: 136 - protein, 433 aa, synthetic construct
MAQKRPACTLKPECVQQLLVCSQEAKKSAYCPYSHFPVGAALLTQEGRIFKGCNIENACYPLGICAERTAIQKAVSEGYKDFRAIAIASDMQDDFISPCGACRQVMREFGTNWPVYMTKPDGTYIVMTVQELLPSSFGPEDLQKTQGGGGSGGGGSGGGGSGGGGSGGGGSGGGGSGGGGSDIQMTQSPSSVSASVGDRVTITCRASQGISSWLAWYQQKPGKAPKLLLIYAASSLQSGVPSRFSGSGSGTDFTLTISSLQPEDFATYYCQQTNSFPYTFGGGTKVEIKGGGGSGGGGSGGGGSEVQLLESGGGLVQPGGSLRLSCAASGETFSNYAMSWVRQAPGKGLEWVSAISGSGGSTYYADSVKGRFTISRDNSKNTLYLQMNSLRAEDTAVYYCAKGPPTYHTNYYYMDVWGKGTTVTVSSHHHHHH

SEQ ID NO: 137 - protein, 433 aa, synthetic construct
MAQKRPACTLKPECVQQLLVCSQEAKKSAYCPYSHFPVGAALLTQEGRIFKGCNIENACYPLGICAERTAIQKAVSEGYKDFRAIAIASDMQDDFISPCGACRQVMREFGTNWPVYMTKPDGTYIVMTVQELLPSSFGPEDLQKTQGGGGSGGGGSGGGGSGGGGSGGGGSGGGGSGGGGSDIQMTQSPSSVSASVGDRVTITCRASQGISSWLAWYQQKPGKAPKLLIYAASSLOQSGVPSRFSGSGSGTDFTLTISSLQPEDFATYYCQQTNSEPYTFGGGTKVEIKGGGGSGGGGSGGGGSEVQLLESGGGLVQPGGSLRLSCAASGETESSYVMIWVRQAPGKGLEWVSSISGDSVTTYYADSVKGRFTISRDNSKNTLYLOMNSLRAEDTAVYYCAKGPPTYHTNYYYMDVWGKGTTVTVSSHHHHHH

SEQ ID NO: 138 - protein, 452 aa, synthetic construct
MAQKRPACTLKPECVQQLLVCSQEAKKSAYCPYSHFPVGAALLTQEGRIFKGCNIENACYPLGICAERTAIQKAVSEGYKDFRAIAIASDMQDDFISPCGACRQVMREFGTNWPVYMTKPDGTYIVMTVQELLPSSFGPEDLQKTQGGGGSGGGGSGGGGSGGGGSGGGGSGGGGSGGGGSDIQMTQSPSSLSASVGDRVTITCRASQSISSYLNWYQQKPGKAPKLLIYAASSLQSGVPSRFSGSGSGTDFTLTISSLQPEDFATYYCQQSYIAPYTFGGGTKVEIKGGGGSGGGGSGGGGSEVQLVESGGGLVQPGGSLRLSCAASGETFSDHYMDWVRQAPGKGLASGETFSDHYMDWVRQAPGKGLEWVGRIRNKASSYTTEYAASVKGRFTISRDDSKNSLYLQMNSLKTEDTAVYYCAREPKYWIDFDLWGRGTLVTVSSHHHHHH

SEQ ID NO: 139 - protein, 429 aa, synthetic construct
MAQKRPACTLKPECVQQLLVCSQEAKKSAYCPYSHFPVGAALLTQEGRIFKGCNIENACYPLGICAERTAIQKAVSEGYKDFRAIAIASDMQDDFISPCGACRQVMREFGTNWPVYMTKPDGTYIVMTVQELLPSSFGPEDLQKTQGGGGSGGGGSGGGGSGGGGSGGGGSGGGGSGGGGSDIQMTQSPSSLSASVGDRVTITCRASQSISSYLNWYQQKPGKAPKLLIYAASSLQSGVPSRFSGSGSGTDFTLTISSLQPEDFATYYCQQSYIAPYTFGGGTKVEIKGGGGSGGGGSGGGGSEVQLVESGGGLVQPGRSLRLSCTASGFTFSDHDMNWVRQAPGKGLEWVGRTRNAAGSYTTEYAASVKGRFTISRDDSKNSLYLQMNSLKTEDTAVYYCAREPKYWIDFDLWGRGTLVTSSHHHHHH

SEQ ID NO: 140 - protein, 429 aa, synthetic construct
MAQKRPACTLKPECVQQLLVCSQEAKKSAYCPYSHFPVGAALLTQEGRIFKGCNIENACYPLGICAERTAIQKAVSEGYKDFRAIAIASDMQDDFISPCGACRQVMREFGTNWPVYMTKPDGTYIVMTVQELLPSSFGPEDLQKTQGGGGSGGGGSGGGGSGGGGSGGGGSGGGGSGGGGSEVQLVESGGGLVQPGGSLRLSCAASGETFVDHDMDWVRQAPGKGLEWVGRTRNKLGSYTTEYAASVKGRETGRDDSKNSLYLQMNSLKTEDTAVYYCAREPKYWIDFDLWGRGTLVTVSSGGGGSGGGGSGGGGSDIQMTQSPSSLSASVGDRVTITCRASQSISSYLNWYQQKPGKAPKLLIYAASSLQSGVPSRFSGSGSGTDFTLTISSLQPEDFATYYCQQSYIAPYIFGGGTKVEIKHHHHHH

SEQ ID NO: 141 - protein, 438 aa, synthetic construct
MAQKRPACTLKPECVQQLLVCSQEAKKSAYCPYSHFPVGAALLTQEGRIFKGCNIENACYPLGICAERTAIQKAVSEGYKDFRAIAIASDMQDDFISPCGACRQVMREFGTNWPVYMTKPDGTYIVMTVQELLPSSFGPEDLQKTQGGGGSGGGGSGGGGSGGGGSGGGGSGGGGSGGGGSGGGGSDIQMTQSPSSVSASVGDRVTITCRASQGISSWLAWYQQKPGKAPKLLLIYAASSLQSGVPSRFSGSGSGTDFTLTISSLQPEDFATYYCQQTNSFPYTFGGGTKVEIKGGGGSGGGGSGGGGSEVQLLESGGGLVQPGGSLRLSCAASGETFSNYAMSWVRQAPGKGLEWVSAISGSGGSTYYADSVKGRFTISRDNSKNTLYLQMNSLRAEDTAVYYCAKGPPTYHTNYYYMDVWGKGTTVTVSSHHHHHH

SEQ ID NO: 142 - protein, 438 aa, synthetic construct
MAQKRPACTLKPECVQQLLVCSQEAKKSAYCPYSHFPVGAALLTQEGRIFKGCNIENACYPLGICAERTAIQKAVSEGYKDFRAIAIASDMQDDFISPCGACRQVMREFGTNWPVYMTKPDGTYIVMTVQELLPSSFGPEDLQKTQGGGGSGGGGSGGGGSGGGGSGGGGSGGGGSGGGGSGGGGSDIQMTQSPSSVSASVGDRVTITCRASQGISSWLAWYQQKPGKAPKLLIYAASSLOQSGVPSRFSGSGSGTDFTLTISSLQPEDFATYYCQQTNSEPYTFGGGTKVEIKGGGGSGGGGSGGGGSEVQLLESGGGLVQPGGSLRLSCAASGETESSYVMIWVRQAPGKGLEWVSSISGDSVTTYYADSVKGRFTISRDNSKNTLYLOMNSLRAEDTAVYYCAKGPPTYHTNYYYMDVWGKGTTVTVSSHHHHHH

SEQ ID NO: 143 - protein, 457 aa, synthetic construct
MAQKRPACTLKPECVQQLLVCSQEAKKSAYCPYSHFPVGAALLTQEGRIFKGCNIENACYPLGICAERTAIQKAVSEGYKDFRAIAIASDMQDDFISPCGACRQVMREFGTNWPVYMTKPDGTYIVMTVQELLPSSFGPEDLQKTQGGGGSGGGGSGGGGSGGGGSGGGGSGGGGSGGGGSGGGGSDIQMTQSPSSLSASVGDRVTITCRASQSISSYLNWYQQKPGKAPKLLIYAASSLQSGVPSRFSGSGSGTDFTLTISSLQPEDFATYYCQQSYIAPYTFGGGTKVEIKGGGGSGGGGSGGGGSEVQLVESGGGLVQPGGSLRLSCAASGETFSDHYMDWVRQAPGKGLASGETFSDHYMDWVRQAPGKGLEWVGRIRNKASSYTTEYAASVKGRFTISRDDSKNSLYLQMNSLKTEDTAVYYCAREPKYWIDFDLWGRGTLVTVSSHHHHHH

SEQ ID NO: 144 - protein, 434 aa, synthetic construct
MAQKRPACTLKPECVQQLLVCSQEAKKSAYCPYSHFPVGAALLTQEGRIFKGCNIENACYPLGICAERTAIQKAVSEGYKDFRAIAIASDMQDDFISPCGACRQVMREFGTNWPVYMTKPDGTYIVMTVQELLPSSFGPEDLQKTQGGGGSGGGGSGGGGSGGGGSGGGGSGGGGSGGGGSGGGGSDIQMTQSPSSLSASVGDRVTITCRASQSISSYLNWYQQKPGKAPKLLIYAASSLQSGVPSRFSGSGSGTDFTLTISSLQPEDFATYYCQQSYIAPYTFGGGTKVEIKGGGGSGGGGSGGGGSEVQLVESGGGLVQPGRSLRLSCTASGFTFSDHDMNWVRQAPGKGLEWVGRTRNAAGSYTTEYAASVKGRFTISRDDSKNSLYLQMNSLKTEDTAVYYCAREPKYWIDFDLWGRGTLVTSSHHHHHH

SEQ ID NO: 145 - protein, 434 aa, synthetic construct
MAQKRPACTLKPECVQQLLVCSQEAKKSAYCPYSHFPVGAALLTQEGRIFKGCNIENACYPLGICAERTAIQKAVSEGYKDFRAIAIASDMQDDFISPCGACRQVMREFGTNWPVYMTKPDGTYIVMTVQELLPSSFGPEDLQKTQGGGGSGGGGSGGGGSGGGGSGGGGSGGGGSGGGGSGGGGSEVQLVESGGGLVQPGGSLRLSCAASGETFVDHDMDWVRQAPGKGLEWVGRTRNKLGSYTTEYAASVKGRETGRDDSKNSLYLQMNSLKTEDTAVYYCAREPKYWIDFDLWGRGTLVTVSSGGGGSGGGGSGGGGSDIQMTQSPSSLSASVGDRVTITCRASQSISSYLNWYQQKPGKAPKLLIYAASSLQSGVPSRFSGSGSGTDFTLTISSLQPEDFATYYCQQSYIAPYIFGGGTKVEIKHHHHHH

SEQ ID NO: 146 - protein, 443 aa, synthetic construct
MAQKRPACTLKPECVQQLLVCSQEAKKSAYCPYSHFPVGAALLTQEGRIFKGCNIENACYPLGICAERTAIQKAVSEGYKDFRAIAIASDMQDDFISPCGACRQVMREFGTNWPVYMTKPDGTYIVMTVQELLPSSFGPEDLQKTQGGGGSGGGGSGGGGSGGGGSGGGGSGGGGSGGGGSGGGGSGGGGSDIQMTQSPSSVSASVGDRVTITCRASQGISSWLAWYQQKPGKAPKLLLIYAASSLQSGVPSRFSGSGSGTDFTLTISSLQPEDFATYYCQQTNSFPYTFGGGTKVEIKGGGGSGGGGSGGGGSEVQLLESGGGLVQPGGSLRLSCAASGETFSNYAMSWVRQAPGKGLEWVSAISGSGGSTYYADSVKGRFTISRDNSKNTLYLQMNSLRAEDTAVYYCAKGPPTYHTNYYYMDVWGKGTTVTVSSHHHHHH

SEQ ID NO: 147 - protein, 443 aa, synthetic construct
MAQKRPACTLKPECVQQLLVCSQEAKKSAYCPYSHFPVGAALLTQEGRIFKGCNIENACYPLGICAERTAIQKAVSEGYKDFRAIAIASDMQDDFISPCGACRQVMREFGTNWPVYMTKPDGTYIVMTVQELLPSSFGPEDLQKTQGGGGSGGGGSGGGGSGGGGSGGGGSGGGGSGGGGSGGGGSGGGGSDIQMTQSPSSVSASVGDRVTITCRASQGISSWLAWYQQKPGKAPKLLIYAASSLOQSGVPSRFSGSGSGTDFTLTISSLQPEDFATYYCQQTNSEPYTFGGGTKVEIKGGGGSGGGGSGGGGSEVQLLESGGGLVQPGGSLRLSCAASGETESSYVMIWVRQAPGKGLEWVSSISGDSVTTYYADSVKGRFTISRDNSKNTLYLOMNSLRAEDTAVYYCAKGPPTYHTNYYYMDVWGKGTTVTVSSHHHHHH

SEQ ID NO: 148 - protein, 462 aa, synthetic construct
MAQKRPACTLKPECVQQLLVCSQEAKKSAYCPYSHFPVGAALLTQEGRIFKGCNIENACYPLGICAERTAIQKAVSEGYKDFRAIAIASDMQDDFISPCGACRQVMREFGTNWPVYMTKPDGTYIVMTVQELLPSSFGPEDLQKTQGGGGSGGGGSGGGGSGGGGSGGGGSGGGGSGGGGSGGGGSGGGGSDIQMTQSPSSLSASVGDRVTITCRASQSISSYLNWYQQKPGKAPKLLIYAASSLQSGVPSRFSGSGSGTDFTLTISSLQPEDFATYYCQQSYIAPYTFGGGTKVEIKGGGGSGGGGSGGGGSEVQLVESGGGLVQPGGSLRLSCAASGETFSDHYMDWVRQAPGKGLASGETFSDHYMDWVRQAPGKGLEWVGRIRNKASSYTTEYAASVKGRFTISRDDSKNSLYLQMNSLKTEDTAVYYCAREPKYWIDFDLWGRGTLVTVSSHHHHHH

SEQ ID NO: 149 - protein, 439 aa, synthetic construct
MAQKRPACTLKPECVQQLLVCSQEAKKSAYCPYSHFPVGAALLTQEGRIFKGCNIENACYPLGICAERTAIQKAVSEGYKDFRAIAIASDMQDDFISPCGACRQVMREFGTNWPVYMTKPDGTYIVMTVQELLPSSFGPEDLQKTQGGGGSGGGGSGGGGSGGGGSGGGGSGGGGSGGGGSGGGGSGGGGSDIQMTQSPSSLSASVGDRVTITCRASQSISSYLNWYQQKPGKAPKLLIYAASSLQSGVPSRFSGSGSGTDFTLTISSLQPEDFATYYCQQSYIAPYTFGGGTKVEIKGGGGSGGGGSGGGGSEVQLVESGGGLVQPGRSLRLSCTASGFTFSDHDMNWVRQAPGKGLEWVGRTRNAAGSYTTEYAASVKGRFTISRDDSKNSLYLQMNSLKTEDTAVYYCAREPKYWIDFDLWGRGTLVTSSHHHHHH

SEQ ID NO: 150 - protein, 439 aa, synthetic construct
MAQKRPACTLKPECVQQLLVCSQEAKKSAYCPYSHFPVGAALLTQEGRIFKGCNIENACYPLGICAERTAIQKAVSEGYKDFRAIAIASDMQDDFISPCGACRQVMREFGTNWPVYMTKPDGTYIVMTVQELLPSSFGPEDLQKTQGGGGSGGGGSGGGGSGGGGSGGGGSGGGGSGGGGSGGGGSGGGGSEVQLVESGGGLVQPGGSLRLSCAASGETFVDHDMDWVRQAPGKGLEWVGRTRNKLGSYTTEYAASVKGRETGRDDSKNSLYLQMNSLKTEDTAVYYCAREPKYWIDFDLWGRGTLVTVSSGGGGSGGGGSGGGGSDIQMTQSPSSLSASVGDRVTITCRASQSISSYLNWYQQKPGKAPKLLIYAASSLQSGVPSRFSGSGSGTDFTLTISSLQPEDFATYYCQQSYIAPYIFGGGTKVEIKHHHHHH

SEQ ID NO: 151 - protein, 448 aa, synthetic construct
MAQKRPACTLKPECVQQLLVCSQEAKKSAYCPYSHFPVGAALLTQEGRIFKGCNIENACYPLGICAERTAIQKAVSEGYKDFRAIAIASDMQDDFISPCGACRQVMREFGTNWPVYMTKPDGTYIVMTVQELLPSSFGPEDLQKTQGGGGSGGGGSGGGGSGGGGSGGGGSGGGGSGGGGSGGGGSGGGGSGGGGSDIQMTQSPSSVSASVGDRVTITCRASQGISSWLAWYQQKPGKAPKLLLIYAASSLQSGVPSRFSGSGSGTDFTLTISSLQPEDFATYYCQQTNSFPYTFGGGTKVEIKGGGGSGGGGSGGGGSEVQLLESGGGLVQPGGSLRLSCAASGETFSNYAMSWVRQAPGKGLEWVSAISGSGGSTYYADSVKGRFTISRDNSKNTLYLQMNSLRAEDTAVYYCAKGPPTYHTNYYYMDVWGKGTTVTVSSHHHHHH

SEQ ID NO: 152 - protein, 448 aa, synthetic construct
MAQKRPACTLKPECVQQLLVCSQEAKKSAYCPYSHFPVGAALLTQEGRIFKGCNIENACYPLGICAERTAIQKAVSEGYKDFRAIAIASDMQDDFISPCGACRQVMREFGTNWPVYMTKPDGTYIVMTVQELLPSSFGPEDLQKTQGGGGSGGGGSGGGGSGGGGSGGGGSGGGGSGGGGSGGGGSGGGGSGGGGSDIQMTQSPSSVSASVGDRVTITCRASQGISSWLAWYQQKPGKAPKLLIYAASSLOQSGVPSRFSGSGSGTDFTLTISSLQPEDFATYYCQQTNSEPYTFGGGTKVEIKGGGGSGGGGSGGGGSEVQLLESGGGLVQPGGSLRLSCAASGETESSYVMIWVRQAPGKGLEWVSSISGDSVTTYYADSVKGRFTISRDNSKNTLYLOMNSLRAEDTAVYYCAKGPPTYHTNYYYMDVWGKGTTVTVSSHHHHHH

SEQ ID NO: 153 - protein, 467 aa, synthetic construct
MAQKRPACTLKPECVQQLLVCSQEAKKSAYCPYSHFPVGAALLTQEGRIFKGCNIENACYPLGICAERTAIQKAVSEGYKDFRAIAIASDMQDDFISPCGACRQVMREFGTNWPVYMTKPDGTYIVMTVQELLPSSFGPEDLQKTQGGGGSGGGGSGGGGSGGGGSGGGGSGGGGSGGGGSGGGGSGGGGSGGGGSDIQMTQSPSSLSASVGDRVTITCRASQSISSYLNWYQQKPGKAPKLLIYAASSLQSGVPSRFSGSGSGTDFTLTISSLQPEDFATYYCQQSYIAPYTFGGGTKVEIKGGGGSGGGGSGGGGSEVQLVESGGGLVQPGGSLRLSCAASGETFSDHYMDWVRQAPGKGLASGETFSDHYMDWVRQAPGKGLEWVGRIRNKASSYTTEYAASVKGRFTISRDDSKNSLYLQMNSLKTEDTAVYYCAREPKYWIDFDLWGRGTLVTVSSHHHHHH

SEQ ID NO: 154 - protein, 444 aa, synthetic construct
MAQKRPACTLKPECVQQLLVCSQEAKKSAYCPYSHFPVGAALLTQEGRIFKGCNIENACYPLGICAERTAIQKAVSEGYKDFRAIAIASDMQDDFISPCGACRQVMREFGTNWPVYMTKPDGTYIVMTVQELLPSSFGPEDLQKTQGGGGSGGGGSGGGGSGGGGSGGGGSGGGGSGGGGSGGGGSGGGGSGGGGSDIQMTQSPSSLSASVGDRVTITCRASQSISSYLNWYQQKPGKAPKLLIYAASSLQSGVPSRFSGSGSGTDFTLTISSLQPEDFATYYCQQSYIAPYTFGGGTKVEIKGGGGSGGGGSGGGGSEVQLVESGGGLVQPGRSLRLSCTASGFTFSDHDMNWVRQAPGKGLEWVGRTRNAAGSYTTEYAASVKGRFTISRDDSKNSLYLQMNSLKTEDTAVYYCAREPKYWIDFDLWGRGTLVTSSHHHHHH

SEQ ID NO: 155 - protein, 444 aa, synthetic construct
MAQKRPACTLKPECVQQLLVCSQEAKKSAYCPYSHFPVGAALLTQEGRIFKGCNIENACYPLGICAERTAIQKAVSEGYKDFRAIAIASDMQDDFISPCGACRQVMREFGTNWPVYMTKPDGTYIVMTVQELLPSSFGPEDLQKTQGGGGSGGGGSGGGGSGGGGSGGGGSGGGGSGGGGSGGGGSGGGGSGGGGSEVQLVESGGGLVQPGGSLRLSCAASGETFVDHDMDWVRQAPGKGLEWVGRTRNKLGSYTTEYAASVKGRETGRDDSKNSLYLQMNSLKTEDTAVYYCAREPKYWIDFDLWGRGTLVTVSSGGGGSGGGGSGGGGSDIQMTQSPSSLSASVGDRVTITCRASQSISSYLNWYQQKPGKAPKLLIYAASSLQSGVPSRFSGSGSGTDFTLTISSLQPEDFATYYCQQSYIAPYIFGGGTKVEIKHHHHHH

SEQ ID NO: 156 - protein, 453 aa, synthetic construct
MAQKRPACTLKPECVQQLLVCSQEAKKSAYCPYSHFPVGAALLTQEGRIFKGCNIENACYPLGICAERTAIQKAVSEGYKDFRAIAIASDMQDDFISPCGACRQVMREFGTNWPVYMTKPDGTYIVMTVQELLPSSFGPEDLQKTQGGGGSGGGGSGGGGSGGGGSGGGGSGGGGSGGGGSGGGGSGGGGSGGGGSGGGGSDIQMTQSPSSVSASVGDRVTITCRASQGISSWLAWYQQKPGKAPKLLLIYAASSLQSGVPSRFSGSGSGTDFTLTISSLQPEDFATYYCQQTNSFPYTFGGGTKVEIKGGGGSGGGGSGGGGSEVQLLESGGGLVQPGGSLRLSCAASGETFSNYAMSWVRQAPGKGLEWVSAISGSGGSTYYADSVKGRFTISRDNSKNTLYLQMNSLRAEDTAVYYCAKGPPTYHTNYYYMDVWGKGTTVTVSSHHHHHH

SEQ ID NO: 157 - protein, 453 aa, synthetic construct
MAQKRPACTLKPECVQQLLVCSQEAKKSAYCPYSHFPVGAALLTQEGRIFKGCNIENACYPLGICAERTAIQKAVSEGYKDFRAIAIASDMQDDFISPCGACRQVMREFGTNWPVYMTKPDGTYIVMTVQELLPSSFGPEDLQKTQGGGGSGGGGSGGGGSGGGGSGGGGSGGGGSGGGGSGGGGSGGGGSGGGGSGGGGSDIQMTQSPSSVSASVGDRVTITCRASQGISSWLAWYQQKPGKAPKLLIYAASSLOQSGVPSRFSGSGSGTDFTLTISSLQPEDFATYYCQQTNSEPYTFGGGTKVEIKGGGGSGGGGSGGGGSEVQLLESGGGLVQPGGSLRLSCAASGETESSYVMIWVRQAPGKGLEWVSSISGDSVTTYYADSVKGRFTISRDNSKNTLYLOMNSLRAEDTAVYYCAKGPPTYHTNYYYMDVWGKGTTVTVSSHHHHHH

SEQ ID NO: 158 - protein, 472 aa, synthetic construct
MAQKRPACTLKPECVQQLLVCSQEAKKSAYCPYSHFPVGAALLTQEGRIFKGCNIENACYPLGICAERTAIQKAVSEGYKDFRAIAIASDMQDDFISPCGACRQVMREFGTNWPVYMTKPDGTYIVMTVQELLPSSFGPEDLQKTQGGGGSGGGGSGGGGSGGGGSGGGGSGGGGSGGGGSGGGGSGGGGSGGGGSGGGGSDIQMTQSPSSLSASVGDRVTITCRASQSISSYLNWYQQKPGKAPKLLIYAASSLQSGVPSRFSGSGSGTDFTLTISSLQPEDFATYYCQQSYIAPYTFGGGTKVEIKGGGGSGGGGSGGGGSEVQLVESGGGLVQPGGSLRLSCAASGETFSDHYMDWVRQAPGKGLASGETFSDHYMDWVRQAPGKGLEWVGRIRNKASSYTTEYAASVKGRFTISRDDSKNSLYLQMNSLKTEDTAVYYCAREPKYWIDFDLWGRGTLVTVSSHHHHHH

SEQ ID NO: 159 - protein, 449 aa, synthetic construct
MAQKRPACTLKPECVQQLLVCSQEAKKSAYCPYSHFPVGAALLTQEGRIFKGCNIENACYPLGICAERTAIQKAVSEGYKDFRAIAIASDMQDDFISPCGACRQVMREFGTNWPVYMTKPDGTYIVMTVQELLPSSFGPEDLQKTQGGGGSGGGGSGGGGSGGGGSGGGGSGGGGSGGGGSGGGGSGGGGSGGGGSGGGGSDIQMTQSPSSLSASVGDRVTITCRASQSISSYLNWYQQKPGKAPKLLIYAASSLQSGVPSRFSGSGSGTDFTLTISSLQPEDFATYYCQQSYIAPYTFGGGTKVEIKGGGGSGGGGSGGGGSEVQLVESGGGLVQPGRSLRLSCTASGFTFSDHDMNWVRQAPGKGLEWVGRTRNAAGSYTTEYAASVKGRFTISRDDSKNSLYLQMNSLKTEDTAVYYCAREPKYWIDFDLWGRGTLVTSSHHHHHH

SEQ ID NO: 160 - protein, 449 aa, synthetic construct
MAQKRPACTLKPECVQQLLVCSQEAKKSAYCPYSHFPVGAALLTQEGRIFKGCNIENACYPLGICAERTAIQKAVSEGYKDFRAIAIASDMQDDFISPCGACRQVMREFGTNWPVYMTKPDGTYIVMTVQELLPSSFGPEDLQKTQGGGGSGGGGSGGGGSGGGGSGGGGSGGGGSGGGGSGGGGSGGGGSGGGGSGGGGSEVQLVESGGGLVQPGGSLRLSCAASGETFVDHDMDWVRQAPGKGLEWVGRTRNKLGSYTTEYAASVKGRETGRDDSKNSLYLQMNSLKTEDTAVYYCAREPKYWIDFDLWGRGTLVTVSSGGGGSGGGGSGGGGSDIQMTQSPSSLSASVGDRVTITCRASQSISSYLNWYQQKPGKAPKLLIYAASSLQSGVPSRFSGSGSGTDFTLTISSLQPEDFATYYCQQSYIAPYIFGGGTKVEIKHHHHHH

SEQ ID NO: 161 - protein, 458 aa, synthetic construct
MAQKRPACTLKPECVQQLLVCSQEAKKSAYCPYSHFPVGAALLTQEGRIFKGCNIENACYPLGICAERTAIQKAVSEGYKDFRAIAIASDMQDDFISPCGACRQVMREFGTNWPVYMTKPDGTYIVMTVQELLPSSFGPEDLQKTQGGGGSGGGGSGGGGSGGGGSGGGGSGGGGSGGGGSGGGGSGGGGSGGGGSGGGGSGGGGSDIQMTQSPSSVSASVGDRVTITCRASQGISSWLAWYQQKPGKAPKLLLIYAASSLQSGVPSRFSGSGSGTDFTLTISSLQPEDFATYYCQQTNSFPYTFGGGTKVEIKGGGGSGGGGSGGGGSEVQLLESGGGLVQPGGSLRLSCAASGETFSNYAMSWVRQAPGKGLEWVSAISGSGGSTYYADSVKGRFTISRDNSKNTLYLQMNSLRAEDTAVYYCAKGPPTYHTNYYYMDVWGKGTTVTVSSHHHHHH

SEQ ID NO: 162 - protein, 458 aa, synthetic construct
MAQKRPACTLKPECVQQLLVCSQEAKKSAYCPYSHFPVGAALLTQEGRIFKGCNIENACYPLGICAERTAIQKAVSEGYKDFRAIAIASDMQDDFISPCGACRQVMREFGTNWPVYMTKPDGTYIVMTVQELLPSSFGPEDLQKTQGGGGSGGGGSGGGGSGGGGSGGGGSGGGGSGGGGSGGGGSGGGGSGGGGSGGGGSGGGGSDIQMTQSPSSVSASVGDRVTITCRASQGISSWLAWYQQKPGKAPKLLIYAASSLOQSGVPSRFSGSGSGTDFTLTISSLQPEDFATYYCQQTNSEPYTFGGGTKVEIKGGGGSGGGGSGGGGSEVQLLESGGGLVQPGGSLRLSCAASGETESSYVMIWVRQAPGKGLEWVSSISGDSVTTYYADSVKGRFTISRDNSKNTLYLOMNSLRAEDTAVYYCAKGPPTYHTNYYYMDVWGKGTTVTVSSHHHHHH

SEQ ID NO: 163 - protein, 477 aa, synthetic construct
MAQKRPACTLKPECVQQLLVCSQEAKKSAYCPYSHFPVGAALLTQEGRIFKGCNIENACYPLGICAERTAIQKAVSEGYKDFRAIAIASDMQDDFISPCGACRQVMREFGTNWPVYMTKPDGTYIVMTVQELLPSSFGPEDLQKTQGGGGSGGGGSGGGGSGGGGSGGGGSGGGGSGGGGSGGGGSGGGGSGGGGSGGGGSGGGGSDIQMTQSPSSLSASVGDRVTITCRASQSISSYLNWYQQKPGKAPKLLIYAASSLQSGVPSRFSGSGSGTDFTLTISSLQPEDFATYYCQQSYIAPYTFGGGTKVEIKGGGGSGGGGSGGGGSEVQLVESGGGLVQPGGSLRLSCAASGETFSDHYMDWVRQAPGKGLASGETFSDHYMDWVRQAPGKGLEWVGRIRNKASSYTTEYAASVKGRFTISRDDSKNSLYLQMNSLKTEDTAVYYCAREPKYWIDFDLWGRGTLVTVSSHHHHHH

SEQ ID NO: 164 - protein, 454 aa, synthetic construct
MAQKRPACTLKPECVQQLLVCSQEAKKSAYCPYSHFPVGAALLTQEGRIFKGCNIENACYPLGICAERTAIQKAVSEGYKDFRAIAIASDMQDDFISPCGACRQVMREFGTNWPVYMTKPDGTYIVMTVQELLPSSFGPEDLQKTQGGGGSGGGGSGGGGSGGGGSGGGGSGGGGSGGGGSGGGGSGGGGSGGGGSGGGGSGGGGSDIQMTQSPSSLSASVGDRVTITCRASQSISSYLNWYQQKPGKAPKLLIYAASSLQSGVPSRFSGSGSGTDFTLTISSLQPEDFATYYCQQSYIAPYTFGGGTKVEIKGGGGSGGGGSGGGGSEVQLVESGGGLVQPGRSLRLSCTASGFTFSDHDMNWVRQAPGKGLEWVGRTRNAAGSYTTEYAASVKGRFTISRDDSKNSLYLQMNSLKTEDTAVYYCAREPKYWIDFDLWGRGTLVTSSHHHHHH

SEQ ID NO: 165 - protein, 454 aa, synthetic construct
MAQKRPACTLKPECVQQLLVCSQEAKKSAYCPYSHFPVGAALLTQEGRIFKGCNIENACYPLGICAERTAIQKAVSEGYKDFRAIAIASDMQDDFISPCGACRQVMREFGTNWPVYMTKPDGTYIVMTVQELLPSSFGPEDLQKTQGGGGSGGGGSGGGGSGGGGSGGGGSGGGGSGGGGSGGGGSGGGGSGGGGSGGGGSGGGGSEVQLVESGGGLVQPGGSLRLSCAASGETFVDHDMDWVRQAPGKGLEWVGRTRNKLGSYTTEYAASVKGRETGRDDSKNSLYLQMNSLKTEDTAVYYCAREPKYWIDFDLWGRGTLVTVSSGGGGSGGGGSGGGGSDIQMTQSPSSLSASVGDRVTITCRASQSISSYLNWYQQKPGKAPKLLIYAASSLQSGVPSRFSGSGSGTDFTLTISSLQPEDFATYYCQQSYIAPYIFGGGTKVEIKHHHHHH

SEQ ID NO: 166 - protein, 403 aa, synthetic construct
MAQKRPACTLKPECVQQLLVCSQEAKKSAYCPYSHFPVGAALLTQEGRIFKGCNIENACYPLGICAERTAIQKAVSEGYKDFRAIAIASDMQDDFISPCGACRQVMREFGTNWPVYMTKPDGTYIVMTVQELLPSSFGPEDLQKTQGGGGSEVQLLESGGGLVQPGGSLRLSCAASGETFSNYAMSWVRQAPGKGLEWVSAISGSGGSTYYADSVKGRFTISRDNSKNTLYLQMNSLRAEDTAVYYCAKGPPTYHTNYYYMDVWGKGTTVTVSSGGGGSGGGGSGGGGSDIQMTQSPSSVSASVGDRVTITCRASQGISSWLAWYQQKPGKAPKLLLIYAASSLQSGVPSRFSGSGSGTDFTLTISSLQPEDFATYYCQQTNSFPYTFGGGTKVEIKHHHHHH

SEQ ID NO: 167 - protein, 403 aa, synthetic construct
MAQKRPACTLKPECVQQLLVCSQEAKKSAYCPYSHFPVGAALLTQEGRIFKGCNIENACYPLGICAERTAIQKAVSEGYKDFRAIAIASDMQDDFISPCGACRQVMREFGTNWPVYMTKPDGTYIVMTVQELLPSSFGPEDLQKTQGGGGSEVQLLESGGGLVQPGGSLRLSCAASGETESSYVMIWVRQAPGKGLEWVSSISGDSVTTYYADSVKGRFTISRDNSKNTLYLOMNSLRAEDTAVYYCAKGPPTYHTNYYYMDVWGKGTTVTVSSGGGGSGGGGSGGGGSDIQMTQSPSSVSASVGDRVTITCRASQGISSWLAWYQQKPGKAPKLLIYAASSLOQSGVPSRFSGSGSGTDFTLTISSLQPEDFATYYCQQTNSEPYTFGGGTKVEIKHHHHHH

SEQ ID NO: 168 - protein, 422 aa, synthetic construct
MAQKRPACTLKPECVQQLLVCSQEAKKSAYCPYSHFPVGAALLTQEGRIFKGCNIENACYPLGICAERTAIQKAVSEGYKDFRAIAIASDMQDDFISPCGACRQVMREFGTNWPVYMTKPDGTYIVMTVQELLPSSFGPEDLQKTQGGGGSEVQLVESGGGLVQPGGSLRLSCAASGETFSDHYMDWVRQAPGKGLASGETFSDHYMDWVRQAPGKGLEWVGRIRNKASSYTTEYAASVKGRFTISRDDSKNSLYLQMNSLKTEDTAVYYCAREPKYWIDFDLWGRGTLVTVSSGGGGSGGGGSGGGGSDIQMTQSPSSLSASVGDRVTITCRASQSISSYLNWYQQKPGKAPKLLIYAASSLQSGVPSRFSGSGSGTDFTLTISSLQPEDFATYYCQQSYIAPYTFGGGTKVEIKHHHHHH

SEQ ID NO: 169 - protein, 399 aa, synthetic construct
MAQKRPACTLKPECVQQLLVCSQEAKKSAYCPYSHFPVGAALLTQEGRIFKGCNIENACYPLGICAERTAIQKAVSEGYKDFRAIAIASDMQDDFISPCGACRQVMREFGTNWPVYMTKPDGTYIVMTVQELLPSSFGPEDLQKTQGGGGSEVQLVESGGGLVQPGRSLRLSCTASGFTFSDHDMNWVRQAPGKGLEWVGRTRNAAGSYTTEYAASVKGRFTISRDDSKNSLYLQMNSLKTEDTAVYYCAREPKYWIDFDLWGRGTLVTSSGGGGSGGGGSGGGGSDIQMTQSPSSLSASVGDRVTITCRASQSISSYLNWYQQKPGKAPKLLIYAASSLQSGVPSRFSGSGSGTDFTLTISSLQPEDFATYYCQQSYIAPYTFGGGTKVEIKHHHHHH

SEQ ID NO: 170 - protein, 399 aa, synthetic construct
MAQKRPACTLKPECVQQLLVCSQEAKKSAYCPYSHFPVGAALLTQEGRIFKGCNIENACYPLGICAERTAIQKAVSEGYKDFRAIAIASDMQDDFISPCGACRQVMREFGTNWPVYMTKPDGTYIVMTVQELLPSSFGPEDLQKTQGGGGSDIQMTQSPSSLSASVGDRVTITCRASQSISSYLNWYQQKPGKAPKLLIYAASSLQSGVPSRFSGSGSGTDFTLTISSLQPEDFATYYCQQSYIAPYIFGGGTKVEIKGGGGSGGGGSGGGGSEVQLVESGGGLVQPGGSLRLSCAASGETFVDHDMDWVRQAPGKGLEWVGRTRNKLGSYTTEYAASVKGRETGRDDSKNSLYLQMNSLKTEDTAVYYCAREPKYWIDFDLWGRGTLVTVSSHHHHHH

SEQ ID NO: 171 - protein, 413 aa, synthetic construct
MAQKRPACTLKPECVQQLLVCSQEAKKSAYCPYSHFPVGAALLTQEGRIFKGCNIENACYPLGICAERTAIQKAVSEGYKDFRAIAIASDMQDDFISPCGACRQVMREFGTNWPVYMTKPDGTYIVMTVQELLPSSFGPEDLQKTQGGGGSGGGGSGGGGSEVQLLESGGGLVQPGGSLRLSCAASGETFSNYAMSWVRQAPGKGLEWVSAISGSGGSTYYADSVKGRFTISRDNSKNTLYLQMNSLRAEDTAVYYCAKGPPTYHTNYYYMDVWGKGTTVTVSSGGGGSGGGGSGGGGSDIQMTQSPSSVSASVGDRVTITCRASQGISSWLAWYQQKPGKAPKLLLIYAASSLQSGVPSRFSGSGSGTDFTLTISSLQPEDFATYYCQQTNSFPYTFGGGTKVEIKHHHHHH

SEQ ID NO: 172 - protein, 413 aa, synthetic construct
MAQKRPACTLKPECVQQLLVCSQEAKKSAYCPYSHFPVGAALLTQEGRIFKGCNIENACYPLGICAERTAIQKAVSEGYKDFRAIAIASDMQDDFISPCGACRQVMREFGTNWPVYMTKPDGTYIVMTVQELLPSSFGPEDLQKTQGGGGSGGGGSGGGGSEVQLLESGGGLVQPGGSLRLSCAASGETESSYVMIWVRQAPGKGLEWVSSISGDSVTTYYADSVKGRFTISRDNSKNTLYLOMNSLRAEDTAVYYCAKGPPTYHTNYYYMDVWGKGTTVTVSSGGGGSGGGGSGGGGSDIQMTQSPSSVSASVGDRVTITCRASQGISSWLAWYQQKPGKAPKLLIYAASSLOQSGVPSRFSGSGSGTDFTLTISSLQPEDFATYYCQQTNSEPYTFGGGTKVEIKHHHHHH

SEQ ID NO: 173 - protein, 432 aa, synthetic construct
MAQKRPACTLKPECVQQLLVCSQEAKKSAYCPYSHFPVGAALLTQEGRIFKGCNIENACYPLGICAERTAIQKAVSEGYKDFRAIAIASDMQDDFISPCGACRQVMREFGTNWPVYMTKPDGTYIVMTVQELLPSSFGPEDLQKTQGGGGSGGGGSGGGGSEVQLVESGGGLVQPGGSLRLSCAASGETFSDHYMDWVRQAPGKGLASGETFSDHYMDWVRQAPGKGLEWVGRIRNKASSYTTEYAASVKGRFTISRDDSKNSLYLQMNSLKTEDTAVYYCAREPKYWIDFDLWGRGTLVTVSSGGGGSGGGGSGGGGSDIQMTQSPSSLSASVGDRVTITCRASQSISSYLNWYQQKPGKAPKLLIYAASSLQSGVPSRFSGSGSGTDFTLTISSLQPEDFATYYCQQSYIAPYTFGGGTKVEIKHHHHHH

SEQ ID NO: 174 - protein, 409 aa, synthetic construct
MAQKRPACTLKPECVQQLLVCSQEAKKSAYCPYSHFPVGAALLTQEGRIFKGCNIENACYPLGICAERTAIQKAVSEGYKDFRAIAIASDMQDDFISPCGACRQVMREFGTNWPVYMTKPDGTYIVMTVQELLPSSFGPEDLQKTQGGGGSGGGGSGGGGSEVQLVESGGGLVQPGRSLRLSCTASGFTFSDHDMNWVRQAPGKGLEWVGRTRNAAGSYTTEYAASVKGRFTISRDDSKNSLYLQMNSLKTEDTAVYYCAREPKYWIDFDLWGRGTLVTSSGGGGSGGGGSGGGGSDIQMTQSPSSLSASVGDRVTITCRASQSISSYLNWYQQKPGKAPKLLIYAASSLQSGVPSRFSGSGSGTDFTLTISSLQPEDFATYYCQQSYIAPYTFGGGTKVEIKHHHHHH

SEQ ID NO: 175 - protein, 409 aa, synthetic construct
MAQKRPACTLKPECVQQLLVCSQEAKKSAYCPYSHFPVGAALLTQEGRIFKGCNIENACYPLGICAERTAIQKAVSEGYKDFRAIAIASDMQDDFISPCGACRQVMREFGTNWPVYMTKPDGTYIVMTVQELLPSSFGPEDLQKTQGGGGSGGGGSGGGGSDIQMTQSPSSLSASVGDRVTITCRASQSISSYLNWYQQKPGKAPKLLIYAASSLQSGVPSRFSGSGSGTDFTLTISSLQPEDFATYYCQQSYIAPYIFGGGTKVEIKGGGGSGGGGSGGGGSEVQLVESGGGLVQPGGSLRLSCAASGETFVDHDMDWVRQAPGKGLEWVGRTRNKLGSYTTEYAASVKGRETGRDDSKNSLYLQMNSLKTEDTAVYYCAREPKYWIDFDLWGRGTLVTVSSHHHHHH

SEQ ID NO: 176 - protein, 418 aa, synthetic construct
MAQKRPACTLKPECVQQLLVCSQEAKKSAYCPYSHFPVGAALLTQEGRIFKGCNIENACYPLGICAERTAIQKAVSEGYKDFRAIAIASDMQDDFISPCGACRQVMREFGTNWPVYMTKPDGTYIVMTVQELLPSSFGPEDLQKTQGGGGSGGGGSGGGGSGGGGSEVQLLESGGGLVQPGGSLRLSCAASGETFSNYAMSWVRQAPGKGLEWVSAISGSGGSTYYADSVKGRFTISRDNSKNTLYLQMNSLRAEDTAVYYCAKGPPTYHTNYYYMDVWGKGTTVTVSSGGGGSGGGGSGGGGSDIQMTQSPSSVSASVGDRVTITCRASQGISSWLAWYQQKPGKAPKLLLIYAASSLQSGVPSRFSGSGSGTDFTLTISSLQPEDFATYYCQQTNSFPYTFGGGTKVEIKHHHHHH

SEQ ID NO: 177 - protein, 418 aa, synthetic construct
MAQKRPACTLKPECVQQLLVCSQEAKKSAYCPYSHFPVGAALLTQEGRIFKGCNIENACYPLGICAERTAIQKAVSEGYKDFRAIAIASDMQDDFISPCGACRQVMREFGTNWPVYMTKPDGTYIVMTVQELLPSSFGPEDLQKTQGGGGSGGGGSGGGGSGGGGSEVQLLESGGGLVQPGGSLRLSCAASGETESSYVMIWVRQAPGKGLEWVSSISGDSVTTYYADSVKGRFTISRDNSKNTLYLOMNSLRAEDTAVYYCAKGPPTYHTNYYYMDVWGKGTTVTVSSGGGGSGGGGSGGGGSDIQMTQSPSSVSASVGDRVTITCRASQGISSWLAWYQQKPGKAPKLLIYAASSLOQSGVPSRFSGSGSGTDFTLTISSLQPEDFATYYCQQTNSEPYTFGGGTKVEIKHHHHHH

SEQ ID NO: 178 - protein, 437 aa, synthetic construct
MAQKRPACTLKPECVQQLLVCSQEAKKSAYCPYSHFPVGAALLTQEGRIFKGCNIENACYPLGICAERTAIQKAVSEGYKDFRAIAIASDMQDDFISPCGACRQVMREFGTNWPVYMTKPDGTYIVMTVQELLPSSFGPEDLQKTQGGGGSGGGGSGGGGSGGGGSEVQLVESGGGLVQPGGSLRLSCAASGETFSDHYMDWVRQAPGKGLASGETFSDHYMDWVRQAPGKGLEWVGRIRNKASSYTTEYAASVKGRFTISRDDSKNSLYLQMNSLKTEDTAVYYCAREPKYWIDFDLWGRGTLVTVSSGGGGSGGGGSGGGGSDIQMTQSPSSLSASVGDRVTITCRASQSISSYLNWYQQKPGKAPKLLIYAASSLQSGVPSRFSGSGSGTDFTLTISSLQPEDFATYYCQQSYIAPYTFGGGTKVEIKHHHHHH

SEQ ID NO: 179 - protein, 414 aa, synthetic construct
MAQKRPACTLKPECVQQLLVCSQEAKKSAYCPYSHFPVGAALLTQEGRIFKGCNIENACYPLGICAERTAIQKAVSEGYKDFRAIAIASDMQDDFISPCGACRQVMREFGTNWPVYMTKPDGTYIVMTVQELLPSSFGPEDLQKTQGGGGSGGGGSGGGGSGGGGSEVQLVESGGGLVQPGRSLRLSCTASGFTFSDHDMNWVRQAPGKGLEWVGRTRNAAGSYTTEYAASVKGRFTISRDDSKNSLYLQMNSLKTEDTAVYYCAREPKYWIDFDLWGRGTLVTSSGGGGSGGGGSGGGGSDIQMTQSPSSLSASVGDRVTITCRASQSISSYLNWYQQKPGKAPKLLIYAASSLQSGVPSRFSGSGSGTDFTLTISSLQPEDFATYYCQQSYIAPYTFGGGTKVEIKHHHHHH

SEQ ID NO: 180 - protein, 414 aa, synthetic construct
MAQKRPACTLKPECVQQLLVCSQEAKKSAYCPYSHFPVGAALLTQEGRIFKGCNIENACYPLGICAERTAIQKAVSEGYKDFRAIAIASDMQDDFISPCGACRQVMREFGTNWPVYMTKPDGTYIVMTVQELLPSSFGPEDLQKTQGGGGSGGGGSGGGGSGGGGSDIQMTQSPSSLSASVGDRVTITCRASQSISSYLNWYQQKPGKAPKLLIYAASSLQSGVPSRFSGSGSGTDFTLTISSLQPEDFATYYCQQSYIAPYIFGGGTKVEIKGGGGSGGGGSGGGGSEVQLVESGGGLVQPGGSLRLSCAASGETFVDHDMDWVRQAPGKGLEWVGRTRNKLGSYTTEYAASVKGRETGRDDSKNSLYLQMNSLKTEDTAVYYCAREPKYWIDFDLWGRGTLVTVSSHHHHHH

SEQ ID NO: 181 - protein, 423 aa, synthetic construct
MAQKRPACTLKPECVQQLLVCSQEAKKSAYCPYSHFPVGAALLTQEGRIFKGCNIENACYPLGICAERTAIQKAVSEGYKDFRAIAIASDMQDDFISPCGACRQVMREFGTNWPVYMTKPDGTYIVMTVQELLPSSFGPEDLQKTQGGGGSGGGGSGGGGSGGGGSGGGGSEVQLLESGGGLVQPGGSLRLSCAASGETFSNYAMSWVRQAPGKGLEWVSAISGSGGSTYYADSVKGRFTISRDNSKNTLYLQMNSLRAEDTAVYYCAKGPPTYHTNYYYMDVWGKGTTVTVSSGGGGSGGGGSGGGGSDIQMTQSPSSVSASVGDRVTITCRASQGISSWLAWYQQKPGKAPKLLLIYAASSLQSGVPSRFSGSGSGTDFTLTISSLQPEDFATYYCQQTNSFPYTFGGGTKVEIKHHHHHH

SEQ ID NO: 182 - protein, 423 aa, synthetic construct
MAQKRPACTLKPECVQQLLVCSQEAKKSAYCPYSHFPVGAALLTQEGRIFKGCNIENACYPLGICAERTAIQKAVSEGYKDFRAIAIASDMQDDFISPCGACRQVMREFGTNWPVYMTKPDGTYIVMTVQELLPSSFGPEDLQKTQGGGGSGGGGSGGGGSGGGGSGGGGSEVQLLESGGGLVQPGGSLRLSCAASGETESSYVMIWVRQAPGKGLEWVSSISGDSVTTYYADSVKGRFTISRDNSKNTLYLOMNSLRAEDTAVYYCAKGPPTYHTNYYYMDVWGKGTTVTVSSGGGGSGGGGSGGGGSDIQMTQSPSSVSASVGDRVTITCRASQGISSWLAWYQQKPGKAPKLLIYAASSLOQSGVPSRFSGSGSGTDFTLTISSLQPEDFATYYCQQTNSEPYTFGGGTKVEIKHHHHHH

SEQ ID NO: 183 - protein, 442 aa, synthetic construct
MAQKRPACTLKPECVQQLLVCSQEAKKSAYCPYSHFPVGAALLTQEGRIFKGCNIENACYPLGICAERTAIQKAVSEGYKDFRAIAIASDMQDDFISPCGACRQVMREFGTNWPVYMTKPDGTYIVMTVQELLPSSFGPEDLQKTQGGGGSGGGGSGGGGSGGGGSGGGGSEVQLVESGGGLVQPGGSLRLSCAASGETFSDHYMDWVRQAPGKGLASGETFSDHYMDWVRQAPGKGLEWVGRIRNKASSYTTEYAASVKGRFTISRDDSKNSLYLQMNSLKTEDTAVYYCAREPKYWIDFDLWGRGTLVTVSSGGGGSGGGGSGGGGSDIQMTQSPSSLSASVGDRVTITCRASQSISSYLNWYQQKPGKAPKLLIYAASSLQSGVPSRFSGSGSGTDFTLTISSLQPEDFATYYCQQSYIAPYTFGGGTKVEIKHHHHHH

SEQ ID NO: 184 - protein, 419 aa, synthetic construct
MAQKRPACTLKPECVQQLLVCSQEAKKSAYCPYSHFPVGAALLTQEGRIFKGCNIENACYPLGICAERTAIQKAVSEGYKDFRAIAIASDMQDDFISPCGACRQVMREFGTNWPVYMTKPDGTYIVMTVQELLPSSFGPEDLQKTQGGGGSGGGGSGGGGSGGGGSGGGGSEVQLVESGGGLVQPGRSLRLSCTASGFTFSDHDMNWVRQAPGKGLEWVGRTRNAAGSYTTEYAASVKGRFTISRDDSKNSLYLQMNSLKTEDTAVYYCAREPKYWIDFDLWGRGTLVTSSGGGGSGGGGSGGGGSDIQMTQSPSSLSASVGDRVTITCRASQSISSYLNWYQQKPGKAPKLLIYAASSLQSGVPSRFSGSGSGTDFTLTISSLQPEDFATYYCQQSYIAPYTFGGGTKVEIKHHHHHH

SEQ ID NO: 185 - protein, 419 aa, synthetic construct
MAQKRPACTLKPECVQQLLVCSQEAKKSAYCPYSHFPVGAALLTQEGRIFKGCNIENACYPLGICAERTAIQKAVSEGYKDFRAIAIASDMQDDFISPCGACRQVMREFGTNWPVYMTKPDGTYIVMTVQELLPSSFGPEDLQKTQGGGGSGGGGSGGGGSGGGGSGGGGSDIQMTQSPSSLSASVGDRVTITCRASQSISSYLNWYQQKPGKAPKLLIYAASSLQSGVPSRFSGSGSGTDFTLTISSLQPEDFATYYCQQSYIAPYIFGGGTKVEIKGGGGSGGGGSGGGGSEVQLVESGGGLVQPGGSLRLSCAASGETFVDHDMDWVRQAPGKGLEWVGRTRNKLGSYTTEYAASVKGRETGRDDSKNSLYLQMNSLKTEDTAVYYCAREPKYWIDFDLWGRGTLVTVSSHHHHHH

SEQ ID NO: 186 - protein, 428 aa, synthetic construct
MAQKRPACTLKPECVQQLLVCSQEAKKSAYCPYSHFPVGAALLTQEGRIFKGCNIENACYPLGICAERTAIQKAVSEGYKDFRAIAIASDMQDDFISPCGACRQVMREFGTNWPVYMTKPDGTYIVMTVQELLPSSFGPEDLQKTQGGGGSGGGGSGGGGSGGGGSGGGGSGGGGSEVQLLESGGGLVQPGGSLRLSCAASGETFSNYAMSWVRQAPGKGLEWVSAISGSGGSTYYADSVKGRFTISRDNSKNTLYLQMNSLRAEDTAVYYCAKGPPTYHTNYYYMDVWGKGTTVTVSSGGGGSGGGGSGGGGSDIQMTQSPSSVSASVGDRVTITCRASQGISSWLAWYQQKPGKAPKLLLIYAASSLQSGVPSRFSGSGSGTDFTLTISSLQPEDFATYYCQQTNSFPYTFGGGTKVEIKHHHHHH

SEQ ID NO: 187 - protein, 428 aa, synthetic construct
MAQKRPACTLKPECVQQLLVCSQEAKKSAYCPYSHFPVGAALLTQEGRIFKGCNIENACYPLGICAERTAIQKAVSEGYKDFRAIAIASDMQDDFISPCGACRQVMREFGTNWPVYMTKPDGTYIVMTVQELLPSSFGPEDLQKTQGGGGSGGGGSGGGGSGGGGSGGGGSGGGGSEVQLLESGGGLVQPGGSLRLSCAASGETESSYVMIWVRQAPGKGLEWVSSISGDSVTTYYADSVKGRFTISRDNSKNTLYLOMNSLRAEDTAVYYCAKGPPTYHTNYYYMDVWGKGTTVTVSSGGGGSGGGGSGGGGSDIQMTQSPSSVSASVGDRVTITCRASQGISSWLAWYQQKPGKAPKLLIYAASSLOQSGVPSRFSGSGSGTDFTLTISSLQPEDFATYYCQQTNSEPYTFGGGTKVEIKHHHHHH

SEQ ID NO: 188 - protein, 447 aa, synthetic construct
MAQKRPACTLKPECVQQLLVCSQEAKKSAYCPYSHFPVGAALLTQEGRIFKGCNIENACYPLGICAERTAIQKAVSEGYKDFRAIAIASDMQDDFISPCGACRQVMREFGTNWPVYMTKPDGTYIVMTVQELLPSSFGPEDLQKTQGGGGSGGGGSGGGGSGGGGSGGGGSGGGGSEVQLVESGGGLVQPGGSLRLSCAASGETFSDHYMDWVRQAPGKGLASGETFSDHYMDWVRQAPGKGLEWVGRIRNKASSYTTEYAASVKGRFTISRDDSKNSLYLQMNSLKTEDTAVYYCAREPKYWIDFDLWGRGTLVTVSSGGGGSGGGGSGGGGSDIQMTQSPSSLSASVGDRVTITCRASQSISSYLNWYQQKPGKAPKLLIYAASSLQSGVPSRFSGSGSGTDFTLTISSLQPEDFATYYCQQSYIAPYTFGGGTKVEIKHHHHHH

SEQ ID NO: 189 - protein, 424 aa, synthetic construct
MAQKRPACTLKPECVQQLLVCSQEAKKSAYCPYSHFPVGAALLTQEGRIFKGCNIENACYPLGICAERTAIQKAVSEGYKDFRAIAIASDMQDDFISPCGACRQVMREFGTNWPVYMTKPDGTYIVMTVQELLPSSFGPEDLQKTQGGGGSGGGGSGGGGSGGGGSGGGGSGGGGSEVQLVESGGGLVQPGRSLRLSCTASGFTFSDHDMNWVRQAPGKGLEWVGRTRNAAGSYTTEYAASVKGRFTISRDDSKNSLYLQMNSLKTEDTAVYYCAREPKYWIDFDLWGRGTLVTSSGGGGSGGGGSGGGGSDIQMTQSPSSLSASVGDRVTITCRASQSISSYLNWYQQKPGKAPKLLIYAASSLQSGVPSRFSGSGSGTDFTLTISSLQPEDFATYYCQQSYIAPYTFGGGTKVEIKHHHHHH

SEQ ID NO: 190 - protein, 424 aa, synthetic construct
MAQKRPACTLKPECVQQLLVCSQEAKKSAYCPYSHFPVGAALLTQEGRIFKGCNIENACYPLGICAERTAIQKAVSEGYKDFRAIAIASDMQDDFISPCGACRQVMREFGTNWPVYMTKPDGTYIVMTVQELLPSSFGPEDLQKTQGGGGSGGGGSGGGGSGGGGSGGGGSGGGGSDIQMTQSPSSLSASVGDRVTITCRASQSISSYLNWYQQKPGKAPKLLIYAASSLQSGVPSRFSGSGSGTDFTLTISSLQPEDFATYYCQQSYIAPYIFGGGTKVEIKGGGGSGGGGSGGGGSEVQLVESGGGLVQPGGSLRLSCAASGETFVDHDMDWVRQAPGKGLEWVGRTRNKLGSYTTEYAASVKGRETGRDDSKNSLYLQMNSLKTEDTAVYYCAREPKYWIDFDLWGRGTLVTVSSHHHHHH

SEQ ID NO: 191 - protein, 433 aa, synthetic construct
MAQKRPACTLKPECVQQLLVCSQEAKKSAYCPYSHFPVGAALLTQEGRIFKGCNIENACYPLGICAERTAIQKAVSEGYKDFRAIAIASDMQDDFISPCGACRQVMREFGTNWPVYMTKPDGTYIVMTVQELLPSSFGPEDLQKTQGGGGSGGGGSGGGGSGGGGSGGGGSGGGGSGGGGSEVQLLESGGGLVQPGGSLRLSCAASGETFSNYAMSWVRQAPGKGLEWVSAISGSGGSTYYADSVKGRFTISRDNSKNTLYLQMNSLRAEDTAVYYCAKGPPTYHTNYYYMDVWGKGTTVTVSSGGGGSGGGGSGGGGSDIQMTQSPSSVSASVGDRVTITCRASQGISSWLAWYQQKPGKAPKLLLIYAASSLQSGVPSRFSGSGSGTDFTLTISSLQPEDFATYYCQQTNSFPYTFGGGTKVEIKHHHHHH

SEQ ID NO: 192 - protein, 433 aa, synthetic construct
MAQKRPACTLKPECVQQLLVCSQEAKKSAYCPYSHFPVGAALLTQEGRIFKGCNIENACYPLGICAERTAIQKAVSEGYKDFRAIAIASDMQDDFISPCGACRQVMREFGTNWPVYMTKPDGTYIVMTVQELLPSSFGPEDLQKTQGGGGSGGGGSGGGGSGGGGSGGGGSGGGGSGGGGSEVQLLESGGGLVQPGGSLRLSCAASGETESSYVMIWVRQAPGKGLEWVSSISGDSVTTYYADSVKGRFTISRDNSKNTLYLOMNSLRAEDTAVYYCAKGPPTYHTNYYYMDVWGKGTTVTVSSGGGGSGGGGSGGGGSDIQMTQSPSSVSASVGDRVTITCRASQGISSWLAWYQQKPGKAPKLLIYAASSLOQSGVPSRFSGSGSGTDFTLTISSLQPEDFATYYCQQTNSEPYTFGGGTKVEIKHHHHHH

SEQ ID NO: 193 - protein, 452 aa, synthetic construct
MAQKRPACTLKPECVQQLLVCSQEAKKSAYCPYSHFPVGAALLTQEGRIFKGCNIENACYPLGICAERTAIQKAVSEGYKDFRAIAIASDMQDDFISPCGACRQVMREFGTNWPVYMTKPDGTYIVMTVQELLPSSFGPEDLQKTQGGGGSGGGGSGGGGSGGGGSGGGGSGGGGSGGGGSEVQLVESGGGLVQPGGSLRLSCAASGETFSDHYMDWVRQAPGKGLASGETFSDHYMDWVRQAPGKGLEWVGRIRNKASSYTTEYAASVKGRFTISRDDSKNSLYLQMNSLKTEDTAVYYCAREPKYWIDFDLWGRGTLVTVSSGGGGSGGGGSGGGGSDIQMTQSPSSLSASVGDRVTITCRASQSISSYLNWYQQKPGKAPKLLIYAASSLQSGVPSRFSGSGSGTDFTLTISSLQPEDFATYYCQQSYIAPYTFGGGTKVEIKHHHHHH

SEQ ID NO: 194 - protein, 429 aa, synthetic construct
MAQKRPACTLKPECVQQLLVCSQEAKKSAYCPYSHFPVGAALLTQEGRIFKGCNIENACYPLGICAERTAIQKAVSEGYKDFRAIAIASDMQDDFISPCGACRQVMREFGTNWPVYMTKPDGTYIVMTVQELLPSSFGPEDLQKTQGGGGSGGGGSGGGGSGGGGSGGGGSGGGGSGGGGSEVQLVESGGGLVQPGRSLRLSCTASGFTFSDHDMNWVRQAPGKGLEWVGRTRNAAGSYTTEYAASVKGRFTISRDDSKNSLYLQMNSLKTEDTAVYYCAREPKYWIDFDLWGRGTLVTSSGGGGSGGGGSGGGGSDIQMTQSPSSLSASVGDRVTITCRASQSISSYLNWYQQKPGKAPKLLIYAASSLQSGVPSRFSGSGSGTDFTLTISSLQPEDFATYYCQQSYIAPYTFGGGTKVEIKHHHHHH

SEQ ID NO: 195 - protein, 429 aa, synthetic construct
MAQKRPACTLKPECVQQLLVCSQEAKKSAYCPYSHFPVGAALLTQEGRIFKGCNIENACYPLGICAERTAIQKAVSEGYKDFRAIAIASDMQDDFISPCGACRQVMREFGTNWPVYMTKPDGTYIVMTVQELLPSSFGPEDLQKTQGGGGSGGGGSGGGGSGGGGSGGGGSGGGGSGGGGSDIQMTQSPSSLSASVGDRVTITCRASQSISSYLNWYQQKPGKAPKLLIYAASSLQSGVPSRFSGSGSGTDFTLTISSLQPEDFATYYCQQSYIAPYIFGGGTKVEIKGGGGSGGGGSGGGGSEVQLVESGGGLVQPGGSLRLSCAASGETFVDHDMDWVRQAPGKGLEWVGRTRNKLGSYTTEYAASVKGRETGRDDSKNSLYLQMNSLKTEDTAVYYCAREPKYWIDFDLWGRGTLVTVSSHHHHHH

SEQ ID NO: 196 - protein, 438 aa, synthetic construct
MAQKRPACTLKPECVQQLLVCSQEAKKSAYCPYSHFPVGAALLTQEGRIFKGCNIENACYPLGICAERTAIQKAVSEGYKDFRAIAIASDMQDDFISPCGACRQVMREFGTNWPVYMTKPDGTYIVMTVQELLPSSFGPEDLQKTQGGGGSGGGGSGGGGSGGGGSGGGGSGGGGSGGGGSGGGGSEVQLLESGGGLVQPGGSLRLSCAASGETFSNYAMSWVRQAPGKGLEWVSAISGSGGSTYYADSVKGRFTISRDNSKNTLYLQMNSLRAEDTAVYYCAKGPPTYHTNYYYMDVWGKGTTVTVSSGGGGSGGGGSGGGGSDIQMTQSPSSVSASVGDRVTITCRASQGISSWLAWYQQKPGKAPKLLLIYAASSLQSGVPSRFSGSGSGTDFTLTISSLQPEDFATYYCQQTNSFPYTFGGGTKVEIKHHHHHH

SEQ ID NO: 197 - protein, 438 aa, synthetic construct
MAQKRPACTLKPECVQQLLVCSQEAKKSAYCPYSHFPVGAALLTQEGRIFKGCNIENACYPLGICAERTAIQKAVSEGYKDFRAIAIASDMQDDFISPCGACRQVMREFGTNWPVYMTKPDGTYIVMTVQELLPSSFGPEDLQKTQGGGGSGGGGSGGGGSGGGGSGGGGSGGGGSGGGGSGGGGSEVQLLESGGGLVQPGGSLRLSCAASGETESSYVMIWVRQAPGKGLEWVSSISGDSVTTYYADSVKGRFTISRDNSKNTLYLOMNSLRAEDTAVYYCAKGPPTYHTNYYYMDVWGKGTTVTVSSGGGGSGGGGSGGGGSDIQMTQSPSSVSASVGDRVTITCRASQGISSWLAWYQQKPGKAPKLLIYAASSLOQSGVPSRFSGSGSGTDFTLTISSLQPEDFATYYCQQTNSEPYTFGGGTKVEIKHHHHHH

SEQ ID NO: 198 - protein, 457 aa, synthetic construct
MAQKRPACTLKPECVQQLLVCSQEAKKSAYCPYSHFPVGAALLTQEGRIFKGCNIENACYPLGICAERTAIQKAVSEGYKDFRAIAIASDMQDDFISPCGACRQVMREFGTNWPVYMTKPDGTYIVMTVQELLPSSFGPEDLQKTQGGGGSGGGGSGGGGSGGGGSGGGGSGGGGSGGGGSGGGGSEVQLVESGGGLVQPGGSLRLSCAASGETFSDHYMDWVRQAPGKGLASGETFSDHYMDWVRQAPGKGLEWVGRIRNKASSYTTEYAASVKGRFTISRDDSKNSLYLQMNSLKTEDTAVYYCAREPKYWIDFDLWGRGTLVTVSSGGGGSGGGGSGGGGSDIQMTQSPSSLSASVGDRVTITCRASQSISSYLNWYQQKPGKAPKLLIYAASSLQSGVPSRFSGSGSGTDFTLTISSLQPEDFATYYCQQSYIAPYTFGGGTKVEIKHHHHHH

SEQ ID NO: 199 - protein, 434 aa, synthetic construct
MAQKRPACTLKPECVQQLLVCSQEAKKSAYCPYSHFPVGAALLTQEGRIFKGCNIENACYPLGICAERTAIQKAVSEGYKDFRAIAIASDMQDDFISPCGACRQVMREFGTNWPVYMTKPDGTYIVMTVQELLPSSFGPEDLQKTQGGGGSGGGGSGGGGSGGGGSGGGGSGGGGSGGGGSGGGGSEVQLVESGGGLVQPGRSLRLSCTASGFTFSDHDMNWVRQAPGKGLEWVGRTRNAAGSYTTEYAASVKGRFTISRDDSKNSLYLQMNSLKTEDTAVYYCAREPKYWIDFDLWGRGTLVTSSGGGGSGGGGSGGGGSDIQMTQSPSSLSASVGDRVTITCRASQSISSYLNWYQQKPGKAPKLLIYAASSLQSGVPSRFSGSGSGTDFTLTISSLQPEDFATYYCQQSYIAPYTFGGGTKVEIKHHHHHH

SEQ ID NO: 200 - protein, 434 aa, synthetic construct
MAQKRPACTLKPECVQQLLVCSQEAKKSAYCPYSHFPVGAALLTQEGRIFKGCNIENACYPLGICAERTAIQKAVSEGYKDFRAIAIASDMQDDFISPCGACRQVMREFGTNWPVYMTKPDGTYIVMTVQELLPSSFGPEDLQKTQGGGGSGGGGSGGGGSGGGGSGGGGSGGGGSGGGGSGGGGSDIQMTQSPSSLSASVGDRVTITCRASQSISSYLNWYQQKPGKAPKLLIYAASSLQSGVPSRFSGSGSGTDFTLTISSLQPEDFATYYCQQSYIAPYIFGGGTKVEIKGGGGSGGGGSGGGGSEVQLVESGGGLVQPGGSLRLSCAASGETFVDHDMDWVRQAPGKGLEWVGRTRNKLGSYTTEYAASVKGRETGRDDSKNSLYLQMNSLKTEDTAVYYCAREPKYWIDFDLWGRGTLVTVSSHHHHHH

SEQ ID NO: 201 - protein, 443 aa, synthetic construct
MAQKRPACTLKPECVQQLLVCSQEAKKSAYCPYSHFPVGAALLTQEGRIFKGCNIENACYPLGICAERTAIQKAVSEGYKDFRAIAIASDMQDDFISPCGACRQVMREFGTNWPVYMTKPDGTYIVMTVQELLPSSFGPEDLQKTQGGGGSGGGGSGGGGSGGGGSGGGGSGGGGSGGGGSGGGGSGGGGSEVQLLESGGGLVQPGGSLRLSCAASGETFSNYAMSWVRQAPGKGLEWVSAISGSGGSTYYADSVKGRFTISRDNSKNTLYLQMNSLRAEDTAVYYCAKGPPTYHTNYYYMDVWGKGTTVTVSSGGGGSGGGGSGGGGSDIQMTQSPSSVSASVGDRVTITCRASQGISSWLAWYQQKPGKAPKLLLIYAASSLQSGVPSRFSGSGSGTDFTLTISSLQPEDFATYYCQQTNSFPYTFGGGTKVEIKHHHHHH

SEQ ID NO: 202 - protein, 443 aa, synthetic construct
MAQKRPACTLKPECVQQLLVCSQEAKKSAYCPYSHFPVGAALLTQEGRIFKGCNIENACYPLGICAERTAIQKAVSEGYKDFRAIAIASDMQDDFISPCGACRQVMREFGTNWPVYMTKPDGTYIVMTVQELLPSSFGPEDLQKTQGGGGSGGGGSGGGGSGGGGSGGGGSGGGGSGGGGSGGGGSGGGGSEVQLLESGGGLVQPGGSLRLSCAASGETESSYVMIWVRQAPGKGLEWVSSISGDSVTTYYADSVKGRFTISRDNSKNTLYLOMNSLRAEDTAVYYCAKGPPTYHTNYYYMDVWGKGTTVTVSSGGGGSGGGGSGGGGSDIQMTQSPSSVSASVGDRVTITCRASQGISSWLAWYQQKPGKAPKLLIYAASSLOQSGVPSRFSGSGSGTDFTLTISSLQPEDFATYYCQQTNSEPYTFGGGTKVEIKHHHHHH

SEQ ID NO: 203 - protein, 462 aa, synthetic construct
MAQKRPACTLKPECVQQLLVCSQEAKKSAYCPYSHFPVGAALLTQEGRIFKGCNIENACYPLGICAERTAIQKAVSEGYKDFRAIAIASDMQDDFISPCGACRQVMREFGTNWPVYMTKPDGTYIVMTVQELLPSSFGPEDLQKTQGGGGSGGGGSGGGGSGGGGSGGGGSGGGGSGGGGSGGGGSGGGGSEVQLVESGGGLVQPGGSLRLSCAASGETFSDHYMDWVRQAPGKGLASGETFSDHYMDWVRQAPGKGLEWVGRIRNKASSYTTEYAASVKGRFTISRDDSKNSLYLQMNSLKTEDTAVYYCAREPKYWIDFDLWGRGTLVTVSSGGGGSGGGGSGGGGSDIQMTQSPSSLSASVGDRVTITCRASQSISSYLNWYQQKPGKAPKLLIYAASSLQSGVPSRFSGSGSGTDFTLTISSLQPEDFATYYCQQSYIAPYTFGGGTKVEIKHHHHHH

SEQ ID NO: 204 - protein, 439 aa, synthetic construct
MAQKRPACTLKPECVQQLLVCSQEAKKSAYCPYSHFPVGAALLTQEGRIFKGCNIENACYPLGICAERTAIQKAVSEGYKDFRAIAIASDMQDDFISPCGACRQVMREFGTNWPVYMTKPDGTYIVMTVQELLPSSFGPEDLQKTQGGGGSGGGGSGGGGSGGGGSGGGGSGGGGSGGGGSGGGGSGGGGSEVQLVESGGGLVQPGRSLRLSCTASGFTFSDHDMNWVRQAPGKGLEWVGRTRNAAGSYTTEYAASVKGRFTISRDDSKNSLYLQMNSLKTEDTAVYYCAREPKYWIDFDLWGRGTLVTSSGGGGSGGGGSGGGGSDIQMTQSPSSLSASVGDRVTITCRASQSISSYLNWYQQKPGKAPKLLIYAASSLQSGVPSRFSGSGSGTDFTLTISSLQPEDFATYYCQQSYIAPYTFGGGTKVEIKHHHHHH

SEQ ID NO: 205 - protein, 439 aa, synthetic construct
MAQKRPACTLKPECVQQLLVCSQEAKKSAYCPYSHFPVGAALLTQEGRIFKGCNIENACYPLGICAERTAIQKAVSEGYKDFRAIAIASDMQDDFISPCGACRQVMREFGTNWPVYMTKPDGTYIVMTVQELLPSSFGPEDLQKTQGGGGSGGGGSGGGGSGGGGSGGGGSGGGGSGGGGSGGGGSGGGGSDIQMTQSPSSLSASVGDRVTITCRASQSISSYLNWYQQKPGKAPKLLIYAASSLQSGVPSRFSGSGSGTDFTLTISSLQPEDFATYYCQQSYIAPYIFGGGTKVEIKGGGGSGGGGSGGGGSEVQLVESGGGLVQPGGSLRLSCAASGETFVDHDMDWVRQAPGKGLEWVGRTRNKLGSYTTEYAASVKGRETGRDDSKNSLYLQMNSLKTEDTAVYYCAREPKYWIDFDLWGRGTLVTVSSHHHHHH

SEQ ID NO: 206 - protein, 448 aa, synthetic construct
MAQKRPACTLKPECVQQLLVCSQEAKKSAYCPYSHFPVGAALLTQEGRIFKGCNIENACYPLGICAERTAIQKAVSEGYKDFRAIAIASDMQDDFISPCGACRQVMREFGTNWPVYMTKPDGTYIVMTVQELLPSSFGPEDLQKTQGGGGSGGGGSGGGGSGGGGSGGGGSGGGGSGGGGSGGGGSGGGGSGGGGSEVQLLESGGGLVQPGGSLRLSCAASGETFSNYAMSWVRQAPGKGLEWVSAISGSGGSTYYADSVKGRFTISRDNSKNTLYLQMNSLRAEDTAVYYCAKGPPTYHTNYYYMDVWGKGTTVTVSSGGGGSGGGGSGGGGSDIQMTQSPSSVSASVGDRVTITCRASQGISSWLAWYQQKPGKAPKLLLIYAASSLQSGVPSRFSGSGSGTDFTLTISSLQPEDFATYYCQQTNSFPYTFGGGTKVEIKHHHHHH

SEQ ID NO: 207 - protein, 448 aa, synthetic construct
MAQKRPACTLKPECVQQLLVCSQEAKKSAYCPYSHFPVGAALLTQEGRIFKGCNIENACYPLGICAERTAIQKAVSEGYKDFRAIAIASDMQDDFISPCGACRQVMREFGTNWPVYMTKPDGTYIVMTVQELLPSSFGPEDLQKTQGGGGSGGGGSGGGGSGGGGSGGGGSGGGGSGGGGSGGGGSGGGGSGGGGSEVQLLESGGGLVQPGGSLRLSCAASGETESSYVMIWVRQAPGKGLEWVSSISGDSVTTYYADSVKGRFTISRDNSKNTLYLOMNSLRAEDTAVYYCAKGPPTYHTNYYYMDVWGKGTTVTVSSGGGGSGGGGSGGGGSDIQMTQSPSSVSASVGDRVTITCRASQGISSWLAWYQQKPGKAPKLLIYAASSLOQSGVPSRFSGSGSGTDFTLTISSLQPEDFATYYCQQTNSEPYTFGGGTKVEIKHHHHHH

SEQ ID NO: 208 - protein, 467 aa, synthetic construct
MAQKRPACTLKPECVQQLLVCSQEAKKSAYCPYSHFPVGAALLTQEGRIFKGCNIENACYPLGICAERTAIQKAVSEGYKDFRAIAIASDMQDDFISPCGACRQVMREFGTNWPVYMTKPDGTYIVMTVQELLPSSFGPEDLQKTQGGGGSGGGGSGGGGSGGGGSGGGGSGGGGSGGGGSGGGGSGGGGSGGGGSEVQLVESGGGLVQPGGSLRLSCAASGETFSDHYMDWVRQAPGKGLASGETFSDHYMDWVRQAPGKGLEWVGRIRNKASSYTTEYAASVKGRFTISRDDSKNSLYLQMNSLKTEDTAVYYCAREPKYWIDFDLWGRGTLVTVSSGGGGSGGGGSGGGGSDIQMTQSPSSLSASVGDRVTITCRASQSISSYLNWYQQKPGKAPKLLIYAASSLQSGVPSRFSGSGSGTDFTLTISSLQPEDFATYYCQQSYIAPYTFGGGTKVEIKHHHHHH

SEQ ID NO: 209 - protein, 444 aa, synthetic construct
MAQKRPACTLKPECVQQLLVCSQEAKKSAYCPYSHFPVGAALLTQEGRIFKGCNIENACYPLGICAERTAIQKAVSEGYKDFRAIAIASDMQDDFISPCGACRQVMREFGTNWPVYMTKPDGTYIVMTVQELLPSSFGPEDLQKTQGGGGSGGGGSGGGGSGGGGSGGGGSGGGGSGGGGSGGGGSGGGGSGGGGSEVQLVESGGGLVQPGRSLRLSCTASGFTFSDHDMNWVRQAPGKGLEWVGRTRNAAGSYTTEYAASVKGRFTISRDDSKNSLYLQMNSLKTEDTAVYYCAREPKYWIDFDLWGRGTLVTSSGGGGSGGGGSGGGGSDIQMTQSPSSLSASVGDRVTITCRASQSISSYLNWYQQKPGKAPKLLIYAASSLQSGVPSRFSGSGSGTDFTLTISSLQPEDFATYYCQQSYIAPYTFGGGTKVEIKHHHHHH

SEQ ID NO: 210 - protein, 444 aa, synthetic construct
MAQKRPACTLKPECVQQLLVCSQEAKKSAYCPYSHFPVGAALLTQEGRIFKGCNIENACYPLGICAERTAIQKAVSEGYKDFRAIAIASDMQDDFISPCGACRQVMREFGTNWPVYMTKPDGTYIVMTVQELLPSSFGPEDLQKTQGGGGSGGGGSGGGGSGGGGSGGGGSGGGGSGGGGSGGGGSGGGGSGGGGSDIQMTQSPSSLSASVGDRVTITCRASQSISSYLNWYQQKPGKAPKLLIYAASSLQSGVPSRFSGSGSGTDFTLTISSLQPEDFATYYCQQSYIAPYIFGGGTKVEIKGGGGSGGGGSGGGGSEVQLVESGGGLVQPGGSLRLSCAASGETFVDHDMDWVRQAPGKGLEWVGRTRNKLGSYTTEYAASVKGRETGRDDSKNSLYLQMNSLKTEDTAVYYCAREPKYWIDFDLWGRGTLVTVSSHHHHHH

SEQ ID NO: 211 - protein, 453 aa, synthetic construct
MAQKRPACTLKPECVQQLLVCSQEAKKSAYCPYSHFPVGAALLTQEGRIFKGCNIENACYPLGICAERTAIQKAVSEGYKDFRAIAIASDMQDDFISPCGACRQVMREFGTNWPVYMTKPDGTYIVMTVQELLPSSFGPEDLQKTQGGGGSGGGGSGGGGSGGGGSGGGGSGGGGSGGGGSGGGGSGGGGSGGGGSGGGGSEVQLLESGGGLVQPGGSLRLSCAASGETFSNYAMSWVRQAPGKGLEWVSAISGSGGSTYYADSVKGRFTISRDNSKNTLYLQMNSLRAEDTAVYYCAKGPPTYHTNYYYMDVWGKGTTVTVSSGGGGSGGGGSGGGGSDIQMTQSPSSVSASVGDRVTITCRASQGISSWLAWYQQKPGKAPKLLLIYAASSLQSGVPSRFSGSGSGTDFTLTISSLQPEDFATYYCQQTNSFPYTFGGGTKVEIKHHHHHH

SEQ ID NO: 212 - protein, 453 aa, synthetic construct
MAQKRPACTLKPECVQQLLVCSQEAKKSAYCPYSHFPVGAALLTQEGRIFKGCNIENACYPLGICAERTAIQKAVSEGYKDFRAIAIASDMQDDFISPCGACRQVMREFGTNWPVYMTKPDGTYIVMTVQELLPSSFGPEDLQKTQGGGGSGGGGSGGGGSGGGGSGGGGSGGGGSGGGGSGGGGSGGGGSGGGGSGGGGSEVQLLESGGGLVQPGGSLRLSCAASGETESSYVMIWVRQAPGKGLEWVSSISGDSVTTYYADSVKGRFTISRDNSKNTLYLOMNSLRAEDTAVYYCAKGPPTYHTNYYYMDVWGKGTTVTVSSGGGGSGGGGSGGGGSDIQMTQSPSSVSASVGDRVTITCRASQGISSWLAWYQQKPGKAPKLLIYAASSLOQSGVPSRFSGSGSGTDFTLTISSLQPEDFATYYCQQTNSEPYTFGGGTKVEIKHHHHHH

SEQ ID NO: 213 - protein, 472 aa, synthetic construct
MAQKRPACTLKPECVQQLLVCSQEAKKSAYCPYSHFPVGAALLTQEGRIFKGCNIENACYPLGICAERTAIQKAVSEGYKDFRAIAIASDMQDDFISPCGACRQVMREFGTNWPVYMTKPDGTYIVMTVQELLPSSFGPEDLQKTQGGGGSGGGGSGGGGSGGGGSGGGGSGGGGSGGGGSGGGGSGGGGSGGGGSGGGGSEVQLVESGGGLVQPGGSLRLSCAASGETFSDHYMDWVRQAPGKGLASGETFSDHYMDWVRQAPGKGLEWVGRIRNKASSYTTEYAASVKGRFTISRDDSKNSLYLQMNSLKTEDTAVYYCAREPKYWIDFDLWGRGTLVTVSSGGGGSGGGGSGGGGSDIQMTQSPSSLSASVGDRVTITCRASQSISSYLNWYQQKPGKAPKLLIYAASSLQSGVPSRFSGSGSGTDFTLTISSLQPEDFATYYCQQSYIAPYTFGGGTKVEIKHHHHHH

SEQ ID NO: 214 - protein, 449 aa, synthetic construct
MAQKRPACTLKPECVQQLLVCSQEAKKSAYCPYSHFPVGAALLTQEGRIFKGCNIENACYPLGICAERTAIQKAVSEGYKDFRAIAIASDMQDDFISPCGACRQVMREFGTNWPVYMTKPDGTYIVMTVQELLPSSFGPEDLQKTQGGGGSGGGGSGGGGSGGGGSGGGGSGGGGSGGGGSGGGGSGGGGSGGGGSGGGGSEVQLVESGGGLVQPGRSLRLSCTASGFTFSDHDMNWVRQAPGKGLEWVGRTRNAAGSYTTEYAASVKGRFTISRDDSKNSLYLQMNSLKTEDTAVYYCAREPKYWIDFDLWGRGTLVTSSGGGGSGGGGSGGGGSDIQMTQSPSSLSASVGDRVTITCRASQSISSYLNWYQQKPGKAPKLLIYAASSLQSGVPSRFSGSGSGTDFTLTISSLQPEDFATYYCQQSYIAPYTFGGGTKVEIKHHHHHH

SEQ ID NO: 215 - protein, 449 aa, synthetic construct
MAQKRPACTLKPECVQQLLVCSQEAKKSAYCPYSHFPVGAALLTQEGRIFKGCNIENACYPLGICAERTAIQKAVSEGYKDFRAIAIASDMQDDFISPCGACRQVMREFGTNWPVYMTKPDGTYIVMTVQELLPSSFGPEDLQKTQGGGGSGGGGSGGGGSGGGGSGGGGSGGGGSGGGGSGGGGSGGGGSGGGGSGGGGSDIQMTQSPSSLSASVGDRVTITCRASQSISSYLNWYQQKPGKAPKLLIYAASSLQSGVPSRFSGSGSGTDFTLTISSLQPEDFATYYCQQSYIAPYIFGGGTKVEIKGGGGSGGGGSGGGGSEVQLVESGGGLVQPGGSLRLSCAASGETFVDHDMDWVRQAPGKGLEWVGRTRNKLGSYTTEYAASVKGRETGRDDSKNSLYLQMNSLKTEDTAVYYCAREPKYWIDFDLWGRGTLVTVSSHHHHHH

SEQ ID NO: 216 - protein, 458 aa, synthetic construct
MAQKRPACTLKPECVQQLLVCSQEAKKSAYCPYSHFPVGAALLTQEGRIFKGCNIENACYPLGICAERTAIQKAVSEGYKDFRAIAIASDMQDDFISPCGACRQVMREFGTNWPVYMTKPDGTYIVMTVQELLPSSFGPEDLQKTQGGGGSGGGGSGGGGSGGGGSGGGGSGGGGSGGGGSGGGGSGGGGSGGGGSGGGGSGGGGSEVQLLESGGGLVQPGGSLRLSCAASGETFSNYAMSWVRQAPGKGLEWVSAISGSGGSTYYADSVKGRFTISRDNSKNTLYLQMNSLRAEDTAVYYCAKGPPTYHTNYYYMDVWGKGTTVTVSSGGGGSGGGGSGGGGSDIQMTQSPSSVSASVGDRVTITCRASQGISSWLAWYQQKPGKAPKLLLIYAASSLQSGVPSRFSGSGSGTDFTLTISSLQPEDFATYYCQQTNSFPYTFGGGTKVEIKHHHHHH

SEQ ID NO: 217 - protein, 458 aa, synthetic construct
MAQKRPACTLKPECVQQLLVCSQEAKKSAYCPYSHFPVGAALLTQEGRIFKGCNIENACYPLGICAERTAIQKAVSEGYKDFRAIAIASDMQDDFISPCGACRQVMREFGTNWPVYMTKPDGTYIVMTVQELLPSSFGPEDLQKTQGGGGSGGGGSGGGGSGGGGSGGGGSGGGGSGGGGSGGGGSGGGGSGGGGSGGGGSGGGGSEVQLLESGGGLVQPGGSLRLSCAASGETESSYVMIWVRQAPGKGLEWVSSISGDSVTTYYADSVKGRFTISRDNSKNTLYLOMNSLRAEDTAVYYCAKGPPTYHTNYYYMDVWGKGTTVTVSSGGGGSGGGGSGGGGSDIQMTQSPSSVSASVGDRVTITCRASQGISSWLAWYQQKPGKAPKLLIYAASSLOQSGVPSRFSGSGSGTDFTLTISSLQPEDFATYYCQQTNSEPYTFGGGTKVEIKHHHHHH

SEQ ID NO: 218 - protein, 477 aa, synthetic construct
MAQKRPACTLKPECVQQLLVCSQEAKKSAYCPYSHFPVGAALLTQEGRIFKGCNIENACYPLGICAERTAIQKAVSEGYKDFRAIAIASDMQDDFISPCGACRQVMREFGTNWPVYMTKPDGTYIVMTVQELLPSSFGPEDLQKTQGGGGSGGGGSGGGGSGGGGSGGGGSGGGGSGGGGSGGGGSGGGGSGGGGSGGGGSGGGGSEVQLVESGGGLVQPGGSLRLSCAASGETFSDHYMDWVRQAPGKGLASGETFSDHYMDWVRQAPGKGLEWVGRIRNKASSYTTEYAASVKGRFTISRDDSKNSLYLQMNSLKTEDTAVYYCAREPKYWIDFDLWGRGTLVTVSSGGGGSGGGGSGGGGSDIQMTQSPSSLSASVGDRVTITCRASQSISSYLNWYQQKPGKAPKLLIYAASSLQSGVPSRFSGSGSGTDFTLTISSLQPEDFATYYCQQSYIAPYTFGGGTKVEIKHHHHHH

SEQ ID NO: 219 - protein, 454 aa, synthetic construct
MAQKRPACTLKPECVQQLLVCSQEAKKSAYCPYSHFPVGAALLTQEGRIFKGCNIENACYPLGICAERTAIQKAVSEGYKDFRAIAIASDMQDDFISPCGACRQVMREFGTNWPVYMTKPDGTYIVMTVQELLPSSFGPEDLQKTQGGGGSGGGGSGGGGSGGGGSGGGGSGGGGSGGGGSGGGGSGGGGSGGGGSGGGGSGGGGSEVQLVESGGGLVQPGRSLRLSCTASGFTFSDHDMNWVRQAPGKGLEWVGRTRNAAGSYTTEYAASVKGRFTISRDDSKNSLYLQMNSLKTEDTAVYYCAREPKYWIDFDLWGRGTLVTSSGGGGSGGGGSGGGGSDIQMTQSPSSLSASVGDRVTITCRASQSISSYLNWYQQKPGKAPKLLIYAASSLQSGVPSRFSGSGSGTDFTLTISSLQPEDFATYYCQQSYIAPYTFGGGTKVEIKHHHHHH

SEQ ID NO: 220 - protein, 454 aa, synthetic construct
MAQKRPACTLKPECVQQLLVCSQEAKKSAYCPYSHFPVGAALLTQEGRIFKGCNIENACYPLGICAERTAIQKAVSEGYKDFRAIAIASDMQDDFISPCGACRQVMREFGTNWPVYMTKPDGTYIVMTVQELLPSSFGPEDLQKTQGGGGSGGGGSGGGGSGGGGSGGGGSGGGGSGGGGSGGGGSGGGGSGGGGSGGGGSGGGGSDIQMTQSPSSLSASVGDRVTITCRASQSISSYLNWYQQKPGKAPKLLIYAASSLQSGVPSRFSGSGSGTDFTLTISSLQPEDFATYYCQQSYIAPYIFGGGTKVEIKGGGGSGGGGSGGGGSEVQLVESGGGLVQPGGSLRLSCAASGETFVDHDMDWVRQAPGKGLEWVGRTRNKLGSYTTEYAASVKGRETGRDDSKNSLYLQMNSLKTEDTAVYYCAREPKYWIDFDLWGRGTLVTVSSHHHHHH

SEQ ID NO: 221 - protein, 397 aa, synthetic construct
DIQMTQSPSSVSASVGDRVTITCRASQGISSWLAWYQQKPGKAPKLLLIYAASSLQSGVPSRFSGSGSGTDFTLTISSLQPEDFATYYCQQTNSFPYTFGGGTKVEIKGGGGSGGGGSGGGGSEVQLLESGGGLVQPGGSLRLSCAASGETFSNYAMSWVRQAPGKGLEWVSAISGSGGSTYYADSVKGRFTISRDNSKNTLYLQMNSLRAEDTAVYYCAKGPPTYHTNYYYMDVWGKGTTVTVSSGGGGSMAQKRPACTLKPECVQQLLVCSQEAKKSAYCPYSHFPVGAALLTQEGRIFKGCNIENACYPLGICAERTAIQKAVSEGYKDFRAIAIASDMQDDFISPCGACRQVMREFGTNWPVYMTKPDGTYIVMTVQELLPSSFGPEDLQKTQ

SEQ ID NO: 222 - protein, 407 aa, synthetic construct
DIQMTQSPSSVSASVGDRVTITCRASQGISSWLAWYQQKPGKAPKLLLIYAASSLQSGVPSRFSGSGSGTDFTLTISSLQPEDFATYYCQQTNSFPYTFGGGTKVEIKGGGGSGGGGSGGGGSEVQLLESGGGLVQPGGSLRLSCAASGETFSNYAMSWVRQAPGKGLEWVSAISGSGGSTYYADSVKGRFTISRDNSKNTLYLQMNSLRAEDTAVYYCAKGPPTYHTNYYYMDVWGKGTTVTVSSGGGGSGGGGSGGGGSMAQKRPACTLKPECVQQLLVCSQEAKKSAYCPYSHFPVGAALLTQEGRIFKGCNIENACYPLGICAERTAIQKAVSEGYKDFRAIAIASDMQDDFISPCGACRQVMREFGTNWPVYMTKPDGTYIVMTVQELLPSSFGPEDLQKTQ

SEQ ID NO: 223 - protein, 412 aa, synthetic construct
DIQMTQSPSSVSASVGDRVTITCRASQGISSWLAWYQQKPGKAPKLLLIYAASSLQSGVPSRFSGSGSGTDFTLTISSLQPEDFATYYCQQTNSFPYTFGGGTKVEIKGGGGSGGGGSGGGGSEVQLLESGGGLVQPGGSLRLSCAASGETFSNYAMSWVRQAPGKGLEWVSAISGSGGSTYYADSVKGRFTISRDNSKNTLYLQMNSLRAEDTAVYYCAKGPPTYHTNYYYMDVWGKGTTVTVSSGGGGSGGGGSGGGGSGGGGSMAQKRPACTLKPECVQQLLVCSQEAKKSAYCPYSHFPVGAALLTQEGRIFKGCNIENACYPLGICAERTAIQKAVSEGYKDFRAIAIASDMQDDFISPCGACRQVMREFGTNWPVYMTKPDGTYIVMTVQELLPSSFGPEDLQKTQ

SEQ ID NO: 224 - protein, 417 aa, synthetic construct
DIQMTQSPSSVSASVGDRVTITCRASQGISSWLAWYQQKPGKAPKLLLIYAASSLQSGVPSRFSGSGSGTDFTLTISSLQPEDFATYYCQQTNSFPYTFGGGTKVEIKGGGGSGGGGSGGGGSEVQLLESGGGLVQPGGSLRLSCAASGETFSNYAMSWVRQAPGKGLEWVSAISGSGGSTYYADSVKGRFTISRDNSKNTLYLQMNSLRAEDTAVYYCAKGPPTYHTNYYYMDVWGKGTTVTVSSGGGGSGGGGSGGGGSGGGGSGGGGSMAQKRPACTLKPECVQQLLVCSQEAKKSAYCPYSHFPVGAALLTQEGRIFKGCNIENACYPLGICAERTAIQKAVSEGYKDFRAIAIASDMQDDFISPCGACRQVMREFGTNWPVYMTKPDGTYIVMTVQELLPSSFGPEDLQKTQ

SEQ ID NO: 225 - protein, 422 aa, synthetic construct
DIQMTQSPSSVSASVGDRVTITCRASQGISSWLAWYQQKPGKAPKLLLIYAASSLQSGVPSRFSGSGSGTDFTLTISSLQPEDFATYYCQQTNSFPYTFGGGTKVEIKGGGGSGGGGSGGGGSEVQLLESGGGLVQPGGSLRLSCAASGETFSNYAMSWVRQAPGKGLEWVSAISGSGGSTYYADSVKGRFTISRDNSKNTLYLQMNSLRAEDTAVYYCAKGPPTYHTNYYYMDVWGKGTTVTVSSGGGGSGGGGSGGGGSGGGGSGGGGSGGGGSMAQKRPACTLKPECVQQLLVCSQEAKKSAYCPYSHFPVGAALLTQEGRIFKGCNIENACYPLGICAERTAIQKAVSEGYKDFRAIAIASDMQDDFISPCGACRQVMREFGTNWPVYMTKPDGTYIVMTVQELLPSSFGPEDLQKTQ

SEQ ID NO: 226 - protein, 427 aa, synthetic construct
DIQMTQSPSSVSASVGDRVTITCRASQGISSWLAWYQQKPGKAPKLLLIYAASSLQSGVPSRFSGSGSGTDFTLTISSLQPEDFATYYCQQTNSFPYTFGGGTKVEIKGGGGSGGGGSGGGGSEVQLLESGGGLVQPGGSLRLSCAASGETFSNYAMSWVRQAPGKGLEWVSAISGSGGSTYYADSVKGRFTISRDNSKNTLYLQMNSLRAEDTAVYYCAKGPPTYHTNYYYMDVWGKGTTVTVSSGGGGSGGGGSGGGGSGGGGSGGGGSGGGGSGGGGSMAQKRPACTLKPECVQQLLVCSQEAKKSAYCPYSHFPVGAALLTQEGRIFKGCNIENACYPLGICAERTAIQKAVSEGYKDFRAIAIASDMQDDFISPCGACRQVMREFGTNWPVYMTKPDGTYIVMTVQELLPSSFGPEDLQKTQ

SEQ ID NO: 227 - protein, 432 aa, synthetic construct
DIQMTQSPSSVSASVGDRVTITCRASQGISSWLAWYQQKPGKAPKLLLIYAASSLQSGVPSRFSGSGSGTDFTLTISSLQPEDFATYYCQQTNSFPYTFGGGTKVEIKGGGGSGGGGSGGGGSEVQLLESGGGLVQPGGSLRLSCAASGETFSNYAMSWVRQAPGKGLEWVSAISGSGGSTYYADSVKGRFTISRDNSKNTLYLQMNSLRAEDTAVYYCAKGPPTYHTNYYYMDVWGKGTTVTVSSGGGGSGGGGSGGGGSGGGGSGGGGSGGGGSGGGGSGGGGSMAQKRPACTLKPECVQQLLVCSQEAKKSAYCPYSHFPVGAALLTQEGRIFKGCNIENACYPLGICAERTAIQKAVSEGYKDFRAIAIASDMQDDFISPCGACRQVMREFGTNWPVYMTKPDGTYIVMTVQELLPSSFGPEDLQKTQ

SEQ ID NO: 228 - protein, 437 aa, synthetic construct
DIQMTQSPSSVSASVGDRVTITCRASQGISSWLAWYQQKPGKAPKLLLIYAASSLQSGVPSRFSGSGSGTDFTLTISSLQPEDFATYYCQQTNSFPYTFGGGTKVEIKGGGGSGGGGSGGGGSEVQLLESGGGLVQPGGSLRLSCAASGETFSNYAMSWVRQAPGKGLEWVSAISGSGGSTYYADSVKGRFTISRDNSKNTLYLQMNSLRAEDTAVYYCAKGPPTYHTNYYYMDVWGKGTTVTVSSGGGGSGGGGSGGGGSGGGGSGGGGSGGGGSGGGGSGGGGSGGGGSMAQKRPACTLKPECVQQLLVCSQEAKKSAYCPYSHFPVGAALLTQEGRIFKGCNIENACYPLGICAERTAIQKAVSEGYKDFRAIAIASDMQDDFISPCGACRQVMREFGTNWPVYMTKPDGTYIVMTVQELLPSSFGPEDLQKTQ

SEQ ID NO: 229 - protein, 442 aa, synthetic construct
DIQMTQSPSSVSASVGDRVTITCRASQGISSWLAWYQQKPGKAPKLLLIYAASSLQSGVPSRFSGSGSGTDFTLTISSLQPEDFATYYCQQTNSFPYTFGGGTKVEIKGGGGSGGGGSGGGGSEVQLLESGGGLVQPGGSLRLSCAASGETFSNYAMSWVRQAPGKGLEWVSAISGSGGSTYYADSVKGRFTISRDNSKNTLYLQMNSLRAEDTAVYYCAKGPPTYHTNYYYMDVWGKGTTVTVSSGGGGSGGGGSGGGGSGGGGSGGGGSGGGGSGGGGSGGGGSGGGGSGGGGSMAQKRPACTLKPECVQQLLVCSQEAKKSAYCPYSHFPVGAALLTQEGRIFKGCNIENACYPLGICAERTAIQKAVSEGYKDFRAIAIASDMQDDFISPCGACRQVMREFGTNWPVYMTKPDGTYIVMTVQELLPSSFGPEDLQKTQ

SEQ ID NO: 230 - protein, 447 aa, synthetic construct
DIQMTQSPSSVSASVGDRVTITCRASQGISSWLAWYQQKPGKAPKLLLIYAASSLQSGVPSRFSGSGSGTDFTLTISSLQPEDFATYYCQQTNSFPYTFGGGTKVEIKGGGGSGGGGSGGGGSEVQLLESGGGLVQPGGSLRLSCAASGETFSNYAMSWVRQAPGKGLEWVSAISGSGGSTYYADSVKGRFTISRDNSKNTLYLQMNSLRAEDTAVYYCAKGPPTYHTNYYYMDVWGKGTTVTVSSGGGGSGGGGSGGGGSGGGGSGGGGSGGGGSGGGGSGGGGSGGGGSGGGGSGGGGSMAQKRPACTLKPECVQQLLVCSQEAKKSAYCPYSHFPVGAALLTQEGRIFKGCNIENACYPLGICAERTAIQKAVSEGYKDFRAIAIASDMQDDFISPCGACRQVMREFGTNWPVYMTKPDGTYIVMTVQELLPSSFGPEDLQKTQ

SEQ ID NO: 231 - protein, 452 aa, synthetic construct
DIQMTQSPSSVSASVGDRVTITCRASQGISSWLAWYQQKPGKAPKLLLIYAASSLQSGVPSRFSGSGSGTDFTLTISSLQPEDFATYYCQQTNSFPYTFGGGTKVEIKGGGGSGGGGSGGGGSEVQLLESGGGLVQPGGSLRLSCAASGETFSNYAMSWVRQAPGKGLEWVSAISGSGGSTYYADSVKGRFTISRDNSKNTLYLQMNSLRAEDTAVYYCAKGPPTYHTNYYYMDVWGKGTTVTVSSGGGGSGGGGSGGGGSGGGGSGGGGSGGGGSGGGGSGGGGSGGGGSGGGGSGGGGSGGGGSMAQKRPACTLKPECVQQLLVCSQEAKKSAYCPYSHFPVGAALLTQEGRIFKGCNIENACYPLGICAERTAIQKAVSEGYKDFRAIAIASDMQDDFISPCGACRQVMREFGTNWPVYMTKPDGTYIVMTVQELLPSSFGPEDLQKTQ

SEQ ID NO: 232 - protein, 397 aa, synthetic construct
DIQMTQSPSSVSASVGDRVTITCRASQGISSWLAWYQQKPGKAPKLLIYAASSLOQSGVPSRFSGSGSGTDFTLTISSLQPEDFATYYCQQTNSEPYTFGGGTKVEIKGGGGSGGGGSGGGGSEVQLLESGGGLVQPGGSLRLSCAASGETESSYVMIWVRQAPGKGLEWVSSISGDSVTTYYADSVKGRFTISRDNSKNTLYLOMNSLRAEDTAVYYCAKGPPTYHTNYYYMDVWGKGTTVTVSSGGGGSMAQKRPACTLKPECVQQLLVCSQEAKKSAYCPYSHFPVGAALLTQEGRIFKGCNIENACYPLGICAERTAIQKAVSEGYKDFRAIAIASDMQDDFISPCGACRQVMREFGTNWPVYMTKPDGTYIVMTVQELLPSSFGPEDLQKTQ

SEQ ID NO: 233 - protein, 407 aa, synthetic construct
DIQMTQSPSSVSASVGDRVTITCRASQGISSWLAWYQQKPGKAPKLLIYAASSLOQSGVPSRFSGSGSGTDFTLTISSLQPEDFATYYCQQTNSEPYTFGGGTKVEIKGGGGSGGGGSGGGGSEVQLLESGGGLVQPGGSLRLSCAASGETESSYVMIWVRQAPGKGLEWVSSISGDSVTTYYADSVKGRFTISRDNSKNTLYLOMNSLRAEDTAVYYCAKGPPTYHTNYYYMDVWGKGTTVTVSSGGGGSGGGGSGGGGSMAQKRPACTLKPECVQQLLVCSQEAKKSAYCPYSHFPVGAALLTQEGRIFKGCNIENACYPLGICAERTAIQKAVSEGYKDFRAIAIASDMQDDFISPCGACRQVMREFGTNWPVYMTKPDGTYIVMTVQELLPSSFGPEDLQKTQ

SEQ ID NO: 234 - protein, 412 aa, synthetic construct
DIQMTQSPSSVSASVGDRVTITCRASQGISSWLAWYQQKPGKAPKLLIYAASSLOQSGVPSRFSGSGSGTDFTLTISSLQPEDFATYYCQQTNSEPYTFGGGTKVEIKGGGGSGGGGSGGGGSEVQLLESGGGLVQPGGSLRLSCAASGETESSYVMIWVRQAPGKGLEWVSSISGDSVTTYYADSVKGRFTISRDNSKNTLYLOMNSLRAEDTAVYYCAKGPPTYHTNYYYMDVWGKGTTVTVSSGGGGSGGGGSGGGGSGGGGSMAQKRPACTLKPECVQQLLVCSQEAKKSAYCPYSHFPVGAALLTQEGRIFKGCNIENACYPLGICAERTAIQKAVSEGYKDFRAIAIASDMQDDFISPCGACRQVMREFGTNWPVYMTKPDGTYIVMTVQELLPSSFGPEDLQKTQ

SEQ ID NO: 235 - protein, 417 aa, synthetic construct
DIQMTQSPSSVSASVGDRVTITCRASQGISSWLAWYQQKPGKAPKLLIYAASSLOQSGVPSRFSGSGSGTDFTLTISSLQPEDFATYYCQQTNSEPYTFGGGTKVEIKGGGGSGGGGSGGGGSEVQLLESGGGLVQPGGSLRLSCAASGETESSYVMIWVRQAPGKGLEWVSSISGDSVTTYYADSVKGRFTISRDNSKNTLYLOMNSLRAEDTAVYYCAKGPPTYHTNYYYMDVWGKGTTVTVSSGGGGSGGGGSGGGGSGGGGSGGGGSMAQKRPACTLKPECVQQLLVCSQEAKKSAYCPYSHFPVGAALLTQEGRIFKGCNIENACYPLGICAERTAIQKAVSEGYKDFRAIAIASDMQDDFISPCGACRQVMREFGTNWPVYMTKPDGTYIVMTVQELLPSSFGPEDLQKTQ

SEQ ID NO: 236 - protein, 422 aa, synthetic construct
DIQMTQSPSSVSASVGDRVTITCRASQGISSWLAWYQQKPGKAPKLLIYAASSLOQSGVPSRFSGSGSGTDFTLTISSLQPEDFATYYCQQTNSEPYTFGGGTKVEIKGGGGSGGGGSGGGGSEVQLLESGGGLVQPGGSLRLSCAASGETESSYVMIWVRQAPGKGLEWVSSISGDSVTTYYADSVKGRFTISRDNSKNTLYLOMNSLRAEDTAVYYCAKGPPTYHTNYYYMDVWGKGTTVTVSSGGGGSGGGGSGGGGSGGGGSGGGGSGGGGSMAQKRPACTLKPECVQQLLVCSQEAKKSAYCPYSHFPVGAALLTQEGRIFKGCNIENACYPLGICAERTAIQKAVSEGYKDFRAIAIASDMQDDFISPCGACRQVMREFGTNWPVYMTKPDGTYIVMTVQELLPSSFGPEDLQKTQ

SEQ ID NO: 237 - protein, 427 aa, synthetic construct
DIQMTQSPSSVSASVGDRVTITCRASQGISSWLAWYQQKPGKAPKLLIYAASSLOQSGVPSRFSGSGSGTDFTLTISSLQPEDFATYYCQQTNSEPYTFGGGTKVEIKGGGGSGGGGSGGGGSEVQLLESGGGLVQPGGSLRLSCAASGETESSYVMIWVRQAPGKGLEWVSSISGDSVTTYYADSVKGRFTISRDNSKNTLYLOMNSLRAEDTAVYYCAKGPPTYHTNYYYMDVWGKGTTVTVSSGGGGSGGGGSGGGGSGGGGSGGGGSGGGGSGGGGSMAQKRPACTLKPECVQQLLVCSQEAKKSAYCPYSHFPVGAALLTQEGRIFKGCNIENACYPLGICAERTAIQKAVSEGYKDFRAIAIASDMQDDFISPCGACRQVMREFGTNWPVYMTKPDGTYIVMTVQELLPSSFGPEDLQKTQ

SEQ ID NO: 238 - protein, 432 aa, synthetic construct
DIQMTQSPSSVSASVGDRVTITCRASQGISSWLAWYQQKPGKAPKLLIYAASSLOQSGVPSRFSGSGSGTDFTLTISSLQPEDFATYYCQQTNSEPYTFGGGTKVEIKGGGGSGGGGSGGGGSEVQLLESGGGLVQPGGSLRLSCAASGETESSYVMIWVRQAPGKGLEWVSSISGDSVTTYYADSVKGRFTISRDNSKNTLYLOMNSLRAEDTAVYYCAKGPPTYHTNYYYMDVWGKGTTVTVSSGGGGSGGGGSGGGGSGGGGSGGGGSGGGGSGGGGSGGGGSMAQKRPACTLKPECVQQLLVCSQEAKKSAYCPYSHFPVGAALLTQEGRIFKGCNIENACYPLGICAERTAIQKAVSEGYKDFRAIAIASDMQDDFISPCGACRQVMREFGTNWPVYMTKPDGTYIVMTVQELLPSSFGPEDLQKTQ

SEQ ID NO: 239 - protein, 437 aa, synthetic construct
DIQMTQSPSSVSASVGDRVTITCRASQGISSWLAWYQQKPGKAPKLLIYAASSLOQSGVPSRFSGSGSGTDFTLTISSLQPEDFATYYCQQTNSEPYTFGGGTKVEIKGGGGSGGGGSGGGGSEVQLLESGGGLVQPGGSLRLSCAASGETESSYVMIWVRQAPGKGLEWVSSISGDSVTTYYADSVKGRFTISRDNSKNTLYLOMNSLRAEDTAVYYCAKGPPTYHTNYYYMDVWGKGTTVTVSSGGGGSGGGGSGGGGSGGGGSGGGGSGGGGSGGGGSGGGGSGGGGSMAQKRPACTLKPECVQQLLVCSQEAKKSAYCPYSHFPVGAALLTQEGRIFKGCNIENACYPLGICAERTAIQKAVSEGYKDFRAIAIASDMQDDFISPCGACRQVMREFGTNWPVYMTKPDGTYIVMTVQELLPSSFGPEDLQKTQ

SEQ ID NO: 240 - protein, 442 aa, synthetic construct
DIQMTQSPSSVSASVGDRVTITCRASQGISSWLAWYQQKPGKAPKLLIYAASSLOQSGVPSRFSGSGSGTDFTLTISSLQPEDFATYYCQQTNSEPYTFGGGTKVEIKGGGGSGGGGSGGGGSEVQLLESGGGLVQPGGSLRLSCAASGETESSYVMIWVRQAPGKGLEWVSSISGDSVTTYYADSVKGRFTISRDNSKNTLYLOMNSLRAEDTAVYYCAKGPPTYHTNYYYMDVWGKGTTVTVSSGGGGSGGGGSGGGGSGGGGSGGGGSGGGGSGGGGSGGGGSGGGGSGGGGSMAQKRPACTLKPECVQQLLVCSQEAKKSAYCPYSHFPVGAALLTQEGRIFKGCNIENACYPLGICAERTAIQKAVSEGYKDFRAIAIASDMQDDFISPCGACRQVMREFGTNWPVYMTKPDGTYIVMTVQELLPSSFGPEDLQKTQ

SEQ ID NO: 241 - protein, 447 aa, synthetic construct
DIQMTQSPSSVSASVGDRVTITCRASQGISSWLAWYQQKPGKAPKLLIYAASSLOQSGVPSRFSGSGSGTDFTLTISSLQPEDFATYYCQQTNSEPYTFGGGTKVEIKGGGGSGGGGSGGGGSEVQLLESGGGLVQPGGSLRLSCAASGETESSYVMIWVRQAPGKGLEWVSSISGDSVTTYYADSVKGRFTISRDNSKNTLYLOMNSLRAEDTAVYYCAKGPPTYHTNYYYMDVWGKGTTVTVSSGGGGSGGGGSGGGGSGGGGSGGGGSGGGGSGGGGSGGGGSGGGGSGGGGSGGGGSMAQKRPACTLKPECVQQLLVCSQEAKKSAYCPYSHFPVGAALLTQEGRIFKGCNIENACYPLGICAERTAIQKAVSEGYKDFRAIAIASDMQDDFISPCGACRQVMREFGTNWPVYMTKPDGTYIVMTVQELLPSSFGPEDLQKTQ

SEQ ID NO: 242 - protein, 452 aa, synthetic construct
DIQMTQSPSSVSASVGDRVTITCRASQGISSWLAWYQQKPGKAPKLLIYAASSLOQSGVPSRFSGSGSGTDFTLTISSLQPEDFATYYCQQTNSEPYTFGGGTKVEIKGGGGSGGGGSGGGGSEVQLLESGGGLVQPGGSLRLSCAASGETESSYVMIWVRQAPGKGLEWVSSISGDSVTTYYADSVKGRFTISRDNSKNTLYLOMNSLRAEDTAVYYCAKGPPTYHTNYYYMDVWGKGTTVTVSSGGGGSGGGGSGGGGSGGGGSGGGGSGGGGSGGGGSGGGGSGGGGSGGGGSGGGGSGGGGSMAQKRPACTLKPECVQQLLVCSQEAKKSAYCPYSHFPVGAALLTQEGRIFKGCNIENACYPLGICAERTAIQKAVSEGYKDFRAIAIASDMQDDFISPCGACRQVMREFGTNWPVYMTKPDGTYIVMTVQELLPSSFGPEDLQKTQ

SEQ ID NO: 243 - protein, 416 aa, synthetic construct
DIQMTQSPSSLSASVGDRVTITCRASQSISSYLNWYQQKPGKAPKLLIYAASSLQSGVPSRFSGSGSGTDFTLTISSLQPEDFATYYCQQSYIAPYTFGGGTKVEIKGGGGSGGGGSGGGGSEVQLVESGGGLVQPGGSLRLSCAASGETFSDHYMDWVRQAPGKGLASGETFSDHYMDWVRQAPGKGLEWVGRIRNKASSYTTEYAASVKGRFTISRDDSKNSLYLQMNSLKTEDTAVYYCAREPKYWIDFDLWGRGTLVTVSSGGGGSMAQKRPACTLKPECVQQLLVCSQEAKKSAYCPYSHFPVGAALLTQEGRIFKGCNIENACYPLGICAERTAIQKAVSEGYKDFRAIAIASDMQDDFISPCGACRQVMREFGTNWPVYMTKPDGTYIVMTVQELLPSSFGPEDLQKTQ

SEQ ID NO: 244 - protein, 426 aa, synthetic construct
DIQMTQSPSSLSASVGDRVTITCRASQSISSYLNWYQQKPGKAPKLLIYAASSLQSGVPSRFSGSGSGTDFTLTISSLQPEDFATYYCQQSYIAPYTFGGGTKVEIKGGGGSGGGGSGGGGSEVQLVESGGGLVQPGGSLRLSCAASGETFSDHYMDWVRQAPGKGLASGETFSDHYMDWVRQAPGKGLEWVGRIRNKASSYTTEYAASVKGRFTISRDDSKNSLYLQMNSLKTEDTAVYYCAREPKYWIDFDLWGRGTLVTVSSGGGGSGGGGSGGGGSMAQKRPACTLKPECVQQLLVCSQEAKKSAYCPYSHFPVGAALLTQEGRIFKGCNIENACYPLGICAERTAIQKAVSEGYKDFRAIAIASDMQDDFISPCGACRQVMREFGTNWPVYMTKPDGTYIVMTVQELLPSSFGPEDLQKTQ

SEQ ID NO: 245 - protein, 431 aa, synthetic construct
DIQMTQSPSSLSASVGDRVTITCRASQSISSYLNWYQQKPGKAPKLLIYAASSLQSGVPSRFSGSGSGTDFTLTISSLQPEDFATYYCQQSYIAPYTFGGGTKVEIKGGGGSGGGGSGGGGSEVQLVESGGGLVQPGGSLRLSCAASGETFSDHYMDWVRQAPGKGLASGETFSDHYMDWVRQAPGKGLEWVGRIRNKASSYTTEYAASVKGRFTISRDDSKNSLYLQMNSLKTEDTAVYYCAREPKYWIDFDLWGRGTLVTVSSGGGGSGGGGSGGGGSGGGGSMAQKRPACTLKPECVQQLLVCSQEAKKSAYCPYSHFPVGAALLTQEGRIFKGCNIENACYPLGICAERTAIQKAVSEGYKDFRAIAIASDMQDDFISPCGACRQVMREFGTNWPVYMTKPDGTYIVMTVQELLPSSFGPEDLQKTQ

SEQ ID NO: 246 - protein, 436 aa, synthetic construct
DIQMTQSPSSLSASVGDRVTITCRASQSISSYLNWYQQKPGKAPKLLIYAASSLQSGVPSRFSGSGSGTDFTLTISSLQPEDFATYYCQQSYIAPYTFGGGTKVEIKGGGGSGGGGSGGGGSEVQLVESGGGLVQPGGSLRLSCAASGETFSDHYMDWVRQAPGKGLASGETFSDHYMDWVRQAPGKGLEWVGRIRNKASSYTTEYAASVKGRFTISRDDSKNSLYLQMNSLKTEDTAVYYCAREPKYWIDFDLWGRGTLVTVSSGGGGSGGGGSGGGGSGGGGSGGGGSMAQKRPACTLKPECVQQLLVCSQEAKKSAYCPYSHFPVGAALLTQEGRIFKGCNIENACYPLGICAERTAIQKAVSEGYKDFRAIAIASDMQDDFISPCGACRQVMREFGTNWPVYMTKPDGTYIVMTVQELLPSSFGPEDLQKTQ

SEQ ID NO: 247 - protein, 441 aa, synthetic construct
DIQMTQSPSSLSASVGDRVTITCRASQSISSYLNWYQQKPGKAPKLLIYAASSLQSGVPSRFSGSGSGTDFTLTISSLQPEDFATYYCQQSYIAPYTFGGGTKVEIKGGGGSGGGGSGGGGSEVQLVESGGGLVQPGGSLRLSCAASGETFSDHYMDWVRQAPGKGLASGETFSDHYMDWVRQAPGKGLEWVGRIRNKASSYTTEYAASVKGRFTISRDDSKNSLYLQMNSLKTEDTAVYYCAREPKYWIDFDLWGRGTLVTVSSGGGGSGGGGSGGGGSGGGGSGGGGSGGGGSMAQKRPACTLKPECVQQLLVCSQEAKKSAYCPYSHFPVGAALLTQEGRIFKGCNIENACYPLGICAERTAIQKAVSEGYKDFRAIAIASDMQDDFISPCGACRQVMREFGTNWPVYMTKPDGTYIVMTVQELLPSSFGPEDLQKTQ

SEQ ID NO: 248 - protein, 446 aa, synthetic construct
DIQMTQSPSSLSASVGDRVTITCRASQSISSYLNWYQQKPGKAPKLLIYAASSLQSGVPSRFSGSGSGTDFTLTISSLQPEDFATYYCQQSYIAPYTFGGGTKVEIKGGGGSGGGGSGGGGSEVQLVESGGGLVQPGGSLRLSCAASGETFSDHYMDWVRQAPGKGLASGETFSDHYMDWVRQAPGKGLEWVGRIRNKASSYTTEYAASVKGRFTISRDDSKNSLYLQMNSLKTEDTAVYYCAREPKYWIDFDLWGRGTLVTVSSGGGGSGGGGSGGGGSGGGGSGGGGSGGGGSGGGGSMAQKRPACTLKPECVQQLLVCSQEAKKSAYCPYSHFPVGAALLTQEGRIFKGCNIENACYPLGICAERTAIQKAVSEGYKDFRAIAIASDMQDDFISPCGACRQVMREFGTNWPVYMTKPDGTYIVMTVQELLPSSFGPEDLQKTQ

SEQ ID NO: 249 - protein, 451 aa, synthetic construct
DIQMTQSPSSLSASVGDRVTITCRASQSISSYLNWYQQKPGKAPKLLIYAASSLQSGVPSRFSGSGSGTDFTLTISSLQPEDFATYYCQQSYIAPYTFGGGTKVEIKGGGGSGGGGSGGGGSEVQLVESGGGLVQPGGSLRLSCAASGETFSDHYMDWVRQAPGKGLASGETFSDHYMDWVRQAPGKGLEWVGRIRNKASSYTTEYAASVKGRFTISRDDSKNSLYLQMNSLKTEDTAVYYCAREPKYWIDFDLWGRGTLVTVSSGGGGSGGGGSGGGGSGGGGSGGGGSGGGGSGGGGSGGGGSMAQKRPACTLKPECVQQLLVCSQEAKKSAYCPYSHFPVGAALLTQEGRIFKGCNIENACYPLGICAERTAIQKAVSEGYKDFRAIAIASDMQDDFISPCGACRQVMREFGTNWPVYMTKPDGTYIVMTVQELLPSSFGPEDLQKTQ

SEQ ID NO: 250 - protein, 456 aa, synthetic construct
DIQMTQSPSSLSASVGDRVTITCRASQSISSYLNWYQQKPGKAPKLLIYAASSLQSGVPSRFSGSGSGTDFTLTISSLQPEDFATYYCQQSYIAPYTFGGGTKVEIKGGGGSGGGGSGGGGSEVQLVESGGGLVQPGGSLRLSCAASGETFSDHYMDWVRQAPGKGLASGETFSDHYMDWVRQAPGKGLEWVGRIRNKASSYTTEYAASVKGRFTISRDDSKNSLYLQMNSLKTEDTAVYYCAREPKYWIDFDLWGRGTLVTVSSGGGGSGGGGSGGGGSGGGGSGGGGSGGGGSGGGGSGGGGSGGGGSMAQKRPACTLKPECVQQLLVCSQEAKKSAYCPYSHFPVGAALLTQEGRIFKGCNIENACYPLGICAERTAIQKAVSEGYKDFRAIAIASDMQDDFISPCGACRQVMREFGTNWPVYMTKPDGTYIVMTVQELLPSSFGPEDLQKTQ

SEQ ID NO: 251 - protein, 461 aa, synthetic construct
DIQMTQSPSSLSASVGDRVTITCRASQSISSYLNWYQQKPGKAPKLLIYAASSLQSGVPSRFSGSGSGTDFTLTISSLQPEDFATYYCQQSYIAPYTFGGGTKVEIKGGGGSGGGGSGGGGSEVQLVESGGGLVQPGGSLRLSCAASGETFSDHYMDWVRQAPGKGLASGETFSDHYMDWVRQAPGKGLEWVGRIRNKASSYTTEYAASVKGRFTISRDDSKNSLYLQMNSLKTEDTAVYYCAREPKYWIDFDLWGRGTLVTVSSGGGGSGGGGSGGGGSGGGGSGGGGSGGGGSGGGGSGGGGSGGGGSGGGGSMAQKRPACTLKPECVQQLLVCSQEAKKSAYCPYSHFPVGAALLTQEGRIFKGCNIENACYPLGICAERTAIQKAVSEGYKDFRAIAIASDMQDDFISPCGACRQVMREFGTNWPVYMTKPDGTYIVMTVQELLPSSFGPEDLQKTQ

SEQ ID NO: 252 - protein, 466 aa, synthetic construct
DIQMTQSPSSLSASVGDRVTITCRASQSISSYLNWYQQKPGKAPKLLIYAASSLQSGVPSRFSGSGSGTDFTLTISSLQPEDFATYYCQQSYIAPYTFGGGTKVEIKGGGGSGGGGSGGGGSEVQLVESGGGLVQPGGSLRLSCAASGETFSDHYMDWVRQAPGKGLASGETFSDHYMDWVRQAPGKGLEWVGRIRNKASSYTTEYAASVKGRFTISRDDSKNSLYLQMNSLKTEDTAVYYCAREPKYWIDFDLWGRGTLVTVSSGGGGSGGGGSGGGGSGGGGSGGGGSGGGGSGGGGSGGGGSGGGGSGGGGSGGGGSMAQKRPACTLKPECVQQLLVCSQEAKKSAYCPYSHFPVGAALLTQEGRIFKGCNIENACYPLGICAERTAIQKAVSEGYKDFRAIAIASDMQDDFISPCGACRQVMREFGTNWPVYMTKPDGTYIVMTVQELLPSSFGPEDLQKTQ

SEQ ID NO: 253 - protein, 471 aa, synthetic construct
DIQMTQSPSSLSASVGDRVTITCRASQSISSYLNWYQQKPGKAPKLLIYAASSLQSGVPSRFSGSGSGTDFTLTISSLQPEDFATYYCQQSYIAPYTFGGGTKVEIKGGGGSGGGGSGGGGSEVQLVESGGGLVQPGGSLRLSCAASGETFSDHYMDWVRQAPGKGLASGETFSDHYMDWVRQAPGKGLEWVGRIRNKASSYTTEYAASVKGRFTISRDDSKNSLYLQMNSLKTEDTAVYYCAREPKYWIDFDLWGRGTLVTVSSGGGGSGGGGSGGGGSGGGGSGGGGSGGGGSGGGGSGGGGSGGGGSGGGGSGGGGSGGGGSMAQKRPACTLKPECVQQLLVCSQEAKKSAYCPYSHFPVGAALLTQEGRIFKGCNIENACYPLGICAERTAIQKAVSEGYKDFRAIAIASDMQDDFISPCGACRQVMREFGTNWPVYMTKPDGTYIVMTVQELLPSSFGPEDLQKTQ

SEQ ID NO: 254 - protein, 393 aa, synthetic construct
DIQMTQSPSSLSASVGDRVTITCRASQSISSYLNWYQQKPGKAPKLLIYAASSLQSGVPSRFSGSGSGTDFTLTISSLQPEDFATYYCQQSYIAPYTFGGGTKVEIKGGGGSGGGGSGGGGSEVQLVESGGGLVQPGRSLRLSCTASGFTFSDHDMNWVRQAPGKGLEWVGRTRNAAGSYTTEYAASVKGRFTISRDDSKNSLYLQMNSLKTEDTAVYYCAREPKYWIDFDLWGRGTLVTSSGGGGSMAQKRPACTLKPECVQQLLVCSQEAKKSAYCPYSHFPVGAALLTQEGRIFKGCNIENACYPLGICAERTAIQKAVSEGYKDFRAIAIASDMQDDFISPCGACRQVMREFGTNWPVYMTKPDGTYIVMTVQELLPSSFGPEDLQKTQ

SEQ ID NO: 255 - protein, 403 aa, synthetic construct
DIQMTQSPSSLSASVGDRVTITCRASQSISSYLNWYQQKPGKAPKLLIYAASSLQSGVPSRFSGSGSGTDFTLTISSLQPEDFATYYCQQSYIAPYTFGGGTKVEIKGGGGSGGGGSGGGGSEVQLVESGGGLVQPGRSLRLSCTASGFTFSDHDMNWVRQAPGKGLEWVGRTRNAAGSYTTEYAASVKGRFTISRDDSKNSLYLQMNSLKTEDTAVYYCAREPKYWIDFDLWGRGTLVTSSGGGGSGGGGSGGGGSMAQKRPACTLKPECVQQLLVCSQEAKKSAYCPYSHFPVGAALLTQEGRIFKGCNIENACYPLGICAERTAIQKAVSEGYKDFRAIAIASDMQDDFISPCGACRQVMREFGTNWPVYMTKPDGTYIVMTVQELLPSSFGPEDLQKTQ

SEQ ID NO: 256 - protein, 408 aa, synthetic construct
DIQMTQSPSSLSASVGDRVTITCRASQSISSYLNWYQQKPGKAPKLLIYAASSLQSGVPSRFSGSGSGTDFTLTISSLQPEDFATYYCQQSYIAPYTFGGGTKVEIKGGGGSGGGGSGGGGSEVQLVESGGGLVQPGRSLRLSCTASGFTFSDHDMNWVRQAPGKGLEWVGRTRNAAGSYTTEYAASVKGRFTISRDDSKNSLYLQMNSLKTEDTAVYYCAREPKYWIDFDLWGRGTLVTSSGGGGSGGGGSGGGGSGGGGSMAQKRPACTLKPECVQQLLVCSQEAKKSAYCPYSHFPVGAALLTQEGRIFKGCNIENACYPLGICAERTAIQKAVSEGYKDFRAIAIASDMQDDFISPCGACRQVMREFGTNWPVYMTKPDGTYIVMTVQELLPSSFGPEDLQKTQ

SEQ ID NO: 257 - protein, 413 aa, synthetic construct
DIQMTQSPSSLSASVGDRVTITCRASQSISSYLNWYQQKPGKAPKLLIYAASSLQSGVPSRFSGSGSGTDFTLTISSLQPEDFATYYCQQSYIAPYTFGGGTKVEIKGGGGSGGGGSGGGGSEVQLVESGGGLVQPGRSLRLSCTASGFTFSDHDMNWVRQAPGKGLEWVGRTRNAAGSYTTEYAASVKGRFTISRDDSKNSLYLQMNSLKTEDTAVYYCAREPKYWIDFDLWGRGTLVTSSGGGGSGGGGSGGGGSGGGGSGGGGSMAQKRPACTLKPECVQQLLVCSQEAKKSAYCPYSHFPVGAALLTQEGRIFKGCNIENACYPLGICAERTAIQKAVSEGYKDFRAIAIASDMQDDFISPCGACRQVMREFGTNWPVYMTKPDGTYIVMTVQELLPSSFGPEDLQKTQ

SEQ ID NO: 258 - protein, 418 aa, synthetic construct
DIQMTQSPSSLSASVGDRVTITCRASQSISSYLNWYQQKPGKAPKLLIYAASSLQSGVPSRFSGSGSGTDFTLTISSLQPEDFATYYCQQSYIAPYTFGGGTKVEIKGGGGSGGGGSGGGGSEVQLVESGGGLVQPGRSLRLSCTASGFTFSDHDMNWVRQAPGKGLEWVGRTRNAAGSYTTEYAASVKGRFTISRDDSKNSLYLQMNSLKTEDTAVYYCAREPKYWIDFDLWGRGTLVTSSGGGGSGGGGSGGGGSGGGGSGGGGSGGGGSMAQKRPACTLKPECVQQLLVCSQEAKKSAYCPYSHFPVGAALLTQEGRIFKGCNIENACYPLGICAERTAIQKAVSEGYKDFRAIAIASDMQDDFISPCGACRQVMREFGTNWPVYMTKPDGTYIVMTVQELLPSSFGPEDLQKTQ

SEQ ID NO: 259 - protein, 423 aa, synthetic construct
DIQMTQSPSSLSASVGDRVTITCRASQSISSYLNWYQQKPGKAPKLLIYAASSLQSGVPSRFSGSGSGTDFTLTISSLQPEDFATYYCQQSYIAPYTFGGGTKVEIKGGGGSGGGGSGGGGSEVQLVESGGGLVQPGRSLRLSCTASGFTFSDHDMNWVRQAPGKGLEWVGRTRNAAGSYTTEYAASVKGRFTISRDDSKNSLYLQMNSLKTEDTAVYYCAREPKYWIDFDLWGRGTLVTSSGGGGSGGGGSGGGGSGGGGSGGGGSGGGGSGGGGSMAQKRPACTLKPECVQQLLVCSQEAKKSAYCPYSHFPVGAALLTQEGRIFKGCNIENACYPLGICAERTAIQKAVSEGYKDFRAIAIASDMQDDFISPCGACRQVMREFGTNWPVYMTKPDGTYIVMTVQELLPSSFGPEDLQKTQ

SEQ ID NO: 260 - protein, 428 aa, synthetic construct
DIQMTQSPSSLSASVGDRVTITCRASQSISSYLNWYQQKPGKAPKLLIYAASSLQSGVPSRFSGSGSGTDFTLTISSLQPEDFATYYCQQSYIAPYTFGGGTKVEIKGGGGSGGGGSGGGGSEVQLVESGGGLVQPGRSLRLSCTASGFTFSDHDMNWVRQAPGKGLEWVGRTRNAAGSYTTEYAASVKGRFTISRDDSKNSLYLQMNSLKTEDTAVYYCAREPKYWIDFDLWGRGTLVTSSGGGGSGGGGSGGGGSGGGGSGGGGSGGGGSGGGGSGGGGSMAQKRPACTLKPECVQQLLVCSQEAKKSAYCPYSHFPVGAALLTQEGRIFKGCNIENACYPLGICAERTAIQKAVSEGYKDFRAIAIASDMQDDFISPCGACRQVMREFGTNWPVYMTKPDGTYIVMTVQELLPSSFGPEDLQKTQ

SEQ ID NO: 261 - protein, 433 aa, synthetic construct
DIQMTQSPSSLSASVGDRVTITCRASQSISSYLNWYQQKPGKAPKLLIYAASSLQSGVPSRFSGSGSGTDFTLTISSLQPEDFATYYCQQSYIAPYTFGGGTKVEIKGGGGSGGGGSGGGGSEVQLVESGGGLVQPGRSLRLSCTASGFTFSDHDMNWVRQAPGKGLEWVGRTRNAAGSYTTEYAASVKGRFTISRDDSKNSLYLQMNSLKTEDTAVYYCAREPKYWIDFDLWGRGTLVTSSGGGGSGGGGSGGGGSGGGGSGGGGSGGGGSGGGGSGGGGSGGGGSMAQKRPACTLKPECVQQLLVCSQEAKKSAYCPYSHFPVGAALLTQEGRIFKGCNIENACYPLGICAERTAIQKAVSEGYKDFRAIAIASDMQDDFISPCGACRQVMREFGTNWPVYMTKPDGTYIVMTVQELLPSSFGPEDLQKTQ

SEQ ID NO: 262 - protein, 438 aa, synthetic construct
DIQMTQSPSSLSASVGDRVTITCRASQSISSYLNWYQQKPGKAPKLLIYAASSLQSGVPSRFSGSGSGTDFTLTISSLQPEDFATYYCQQSYIAPYTFGGGTKVEIKGGGGSGGGGSGGGGSEVQLVESGGGLVQPGRSLRLSCTASGFTFSDHDMNWVRQAPGKGLEWVGRTRNAAGSYTTEYAASVKGRFTISRDDSKNSLYLQMNSLKTEDTAVYYCAREPKYWIDFDLWGRGTLVTSSGGGGSGGGGSGGGGSGGGGSGGGGSGGGGSGGGGSGGGGSGGGGSGGGGSMAQKRPACTLKPECVQQLLVCSQEAKKSAYCPYSHFPVGAALLTQEGRIFKGCNIENACYPLGICAERTAIQKAVSEGYKDFRAIAIASDMQDDFISPCGACRQVMREFGTNWPVYMTKPDGTYIVMTVQELLPSSFGPEDLQKTQ

SEQ ID NO: 263 - protein, 443 aa, synthetic construct
DIQMTQSPSSLSASVGDRVTITCRASQSISSYLNWYQQKPGKAPKLLIYAASSLQSGVPSRFSGSGSGTDFTLTISSLQPEDFATYYCQQSYIAPYTFGGGTKVEIKGGGGSGGGGSGGGGSEVQLVESGGGLVQPGRSLRLSCTASGFTFSDHDMNWVRQAPGKGLEWVGRTRNAAGSYTTEYAASVKGRFTISRDDSKNSLYLQMNSLKTEDTAVYYCAREPKYWIDFDLWGRGTLVTSSGGGGSGGGGSGGGGSGGGGSGGGGSGGGGSGGGGSGGGGSGGGGSGGGGSGGGGSMAQKRPACTLKPECVQQLLVCSQEAKKSAYCPYSHFPVGAALLTQEGRIFKGCNIENACYPLGICAERTAIQKAVSEGYKDFRAIAIASDMQDDFISPCGACRQVMREFGTNWPVYMTKPDGTYIVMTVQELLPSSFGPEDLQKTQ

SEQ ID NO: 264 - protein, 448 aa, synthetic construct
DIQMTQSPSSLSASVGDRVTITCRASQSISSYLNWYQQKPGKAPKLLIYAASSLQSGVPSRFSGSGSGTDFTLTISSLQPEDFATYYCQQSYIAPYTFGGGTKVEIKGGGGSGGGGSGGGGSEVQLVESGGGLVQPGRSLRLSCTASGFTFSDHDMNWVRQAPGKGLEWVGRTRNAAGSYTTEYAASVKGRFTISRDDSKNSLYLQMNSLKTEDTAVYYCAREPKYWIDFDLWGRGTLVTSSGGGGSGGGGSGGGGSGGGGSGGGGSGGGGSGGGGSGGGGSGGGGSGGGGSGGGGSGGGGSMAQKRPACTLKPECVQQLLVCSQEAKKSAYCPYSHFPVGAALLTQEGRIFKGCNIENACYPLGICAERTAIQKAVSEGYKDFRAIAIASDMQDDFISPCGACRQVMREFGTNWPVYMTKPDGTYIVMTVQELLPSSFGPEDLQKTQ

SEQ ID NO: 265 - protein, 393 aa, synthetic construct
EVQLVESGGGLVQPGGSLRLSCAASGETFVDHDMDWVRQAPGKGLEWVGRTRNKLGSYTTEYAASVKGRETGRDDSKNSLYLQMNSLKTEDTAVYYCAREPKYWIDFDLWGRGTLVTVSSGGGGSGGGGSGGGGSDIQMTQSPSSLSASVGDRVTITCRASQSISSYLNWYQQKPGKAPKLLIYAASSLQSGVPSRFSGSGSGTDFTLTISSLQPEDFATYYCQQSYIAPYIFGGGTKVEIKGGGGSMAQKRPACTLKPECVQQLLVCSQEAKKSAYCPYSHFPVGAALLTQEGRIFKGCNIENACYPLGICAERTAIQKAVSEGYKDFRAIAIASDMQDDFISPCGACRQVMREFGTNWPVYMTKPDGTYIVMTVQELLPSSFGPEDLQKTQ

SEQ ID NO: 266 - protein, 403 aa, synthetic construct
EVQLVESGGGLVQPGGSLRLSCAASGETFVDHDMDWVRQAPGKGLEWVGRTRNKLGSYTTEYAASVKGRETGRDDSKNSLYLQMNSLKTEDTAVYYCAREPKYWIDFDLWGRGTLVTVSSGGGGSGGGGSGGGGSDIQMTQSPSSLSASVGDRVTITCRASQSISSYLNWYQQKPGKAPKLLIYAASSLQSGVPSRFSGSGSGTDFTLTISSLQPEDFATYYCQQSYIAPYIFGGGTKVEIKGGGGSGGGGSGGGGSMAQKRPACTLKPECVQQLLVCSQEAKKSAYCPYSHFPVGAALLTQEGRIFKGCNIENACYPLGICAERTAIQKAVSEGYKDFRAIAIASDMQDDFISPCGACRQVMREFGTNWPVYMTKPDGTYIVMTVQELLPSSFGPEDLQKTQ

SEQ ID NO: 267 - protein, 408 aa, synthetic construct
EVQLVESGGGLVQPGGSLRLSCAASGETFVDHDMDWVRQAPGKGLEWVGRTRNKLGSYTTEYAASVKGRETGRDDSKNSLYLQMNSLKTEDTAVYYCAREPKYWIDFDLWGRGTLVTVSSGGGGSGGGGSGGGGSDIQMTQSPSSLSASVGDRVTITCRASQSISSYLNWYQQKPGKAPKLLIYAASSLQSGVPSRFSGSGSGTDFTLTISSLQPEDFATYYCQQSYIAPYIFGGGTKVEIKGGGGSGGGGSGGGGSGGGGSMAQKRPACTLKPECVQQLLVCSQEAKKSAYCPYSHFPVGAALLTQEGRIFKGCNIENACYPLGICAERTAIQKAVSEGYKDFRAIAIASDMQDDFISPCGACRQVMREFGTNWPVYMTKPDGTYIVMTVQELLPSSFGPEDLQKTQ

SEQ ID NO: 268 - protein, 413 aa, synthetic construct
EVQLVESGGGLVQPGGSLRLSCAASGETFVDHDMDWVRQAPGKGLEWVGRTRNKLGSYTTEYAASVKGRETGRDDSKNSLYLQMNSLKTEDTAVYYCAREPKYWIDFDLWGRGTLVTVSSGGGGSGGGGSGGGGSDIQMTQSPSSLSASVGDRVTITCRASQSISSYLNWYQQKPGKAPKLLIYAASSLQSGVPSRFSGSGSGTDFTLTISSLQPEDFATYYCQQSYIAPYIFGGGTKVEIKGGGGSGGGGSGGGGSGGGGSGGGGSMAQKRPACTLKPECVQQLLVCSQEAKKSAYCPYSHFPVGAALLTQEGRIFKGCNIENACYPLGICAERTAIQKAVSEGYKDFRAIAIASDMQDDFISPCGACRQVMREFGTNWPVYMTKPDGTYIVMTVQELLPSSFGPEDLQKTQ

SEQ ID NO: 269 - protein, 418 aa, synthetic construct
EVQLVESGGGLVQPGGSLRLSCAASGETFVDHDMDWVRQAPGKGLEWVGRTRNKLGSYTTEYAASVKGRETGRDDSKNSLYLQMNSLKTEDTAVYYCAREPKYWIDFDLWGRGTLVTVSSGGGGSGGGGSGGGGSDIQMTQSPSSLSASVGDRVTITCRASQSISSYLNWYQQKPGKAPKLLIYAASSLQSGVPSRFSGSGSGTDFTLTISSLQPEDFATYYCQQSYIAPYIFGGGTKVEIKGGGGSGGGGSGGGGSGGGGSGGGGSGGGGSMAQKRPACTLKPECVQQLLVCSQEAKKSAYCPYSHFPVGAALLTQEGRIFKGCNIENACYPLGICAERTAIQKAVSEGYKDFRAIAIASDMQDDFISPCGACRQVMREFGTNWPVYMTKPDGTYIVMTVQELLPSSFGPEDLQKTQ

SEQ ID NO: 270 - protein, 423 aa, synthetic construct
EVQLVESGGGLVQPGGSLRLSCAASGETFVDHDMDWVRQAPGKGLEWVGRTRNKLGSYTTEYAASVKGRETGRDDSKNSLYLQMNSLKTEDTAVYYCAREPKYWIDFDLWGRGTLVTVSSGGGGSGGGGSGGGGSDIQMTQSPSSLSASVGDRVTITCRASQSISSYLNWYQQKPGKAPKLLIYAASSLQSGVPSRFSGSGSGTDFTLTISSLQPEDFATYYCQQSYIAPYIFGGGTKVEIKGGGGSGGGGSGGGGSGGGGSGGGGSGGGGSGGGGSMAQKRPACTLKPECVQQLLVCSQEAKKSAYCPYSHFPVGAALLTQEGRIFKGCNIENACYPLGICAERTAIQKAVSEGYKDFRAIAIASDMQDDFISPCGACRQVMREFGTNWPVYMTKPDGTYIVMTVQELLPSSFGPEDLQKTQ

SEQ ID NO: 271 - protein, 428 aa, synthetic construct
EVQLVESGGGLVQPGGSLRLSCAASGETFVDHDMDWVRQAPGKGLEWVGRTRNKLGSYTTEYAASVKGRETGRDDSKNSLYLQMNSLKTEDTAVYYCAREPKYWIDFDLWGRGTLVTVSSGGGGSGGGGSGGGGSDIQMTQSPSSLSASVGDRVTITCRASQSISSYLNWYQQKPGKAPKLLIYAASSLQSGVPSRFSGSGSGTDFTLTISSLQPEDFATYYCQQSYIAPYIFGGGTKVEIKGGGGSGGGGSGGGGSGGGGSGGGGSGGGGSGGGGSGGGGSMAQKRPACTLKPECVQQLLVCSQEAKKSAYCPYSHFPVGAALLTQEGRIFKGCNIENACYPLGICAERTAIQKAVSEGYKDFRAIAIASDMQDDFISPCGACRQVMREFGTNWPVYMTKPDGTYIVMTVQELLPSSFGPEDLQKTQ

SEQ ID NO: 272 - protein, 433 aa, synthetic construct
EVQLVESGGGLVQPGGSLRLSCAASGETFVDHDMDWVRQAPGKGLEWVGRTRNKLGSYTTEYAASVKGRETGRDDSKNSLYLQMNSLKTEDTAVYYCAREPKYWIDFDLWGRGTLVTVSSGGGGSGGGGSGGGGSDIQMTQSPSSLSASVGDRVTITCRASQSISSYLNWYQQKPGKAPKLLIYAASSLQSGVPSRFSGSGSGTDFTLTISSLQPEDFATYYCQQSYIAPYIFGGGTKVEIKGGGGSGGGGSGGGGSGGGGSGGGGSGGGGSGGGGSGGGGSGGGGSMAQKRPACTLKPECVQQLLVCSQEAKKSAYCPYSHFPVGAALLTQEGRIFKGCNIENACYPLGICAERTAIQKAVSEGYKDFRAIAIASDMQDDFISPCGACRQVMREFGTNWPVYMTKPDGTYIVMTVQELLPSSFGPEDLQKTQ

SEQ ID NO: 273 - protein, 438 aa, synthetic construct
EVQLVESGGGLVQPGGSLRLSCAASGETFVDHDMDWVRQAPGKGLEWVGRTRNKLGSYTTEYAASVKGRETGRDDSKNSLYLQMNSLKTEDTAVYYCAREPKYWIDFDLWGRGTLVTVSSGGGGSGGGGSGGGGSDIQMTQSPSSLSASVGDRVTITCRASQSISSYLNWYQQKPGKAPKLLIYAASSLQSGVPSRFSGSGSGTDFTLTISSLQPEDFATYYCQQSYIAPYIFGGGTKVEIKGGGGSGGGGSGGGGSGGGGSGGGGSGGGGSGGGGSGGGGSGGGGSGGGGSMAQKRPACTLKPECVQQLLVCSQEAKKSAYCPYSHFPVGAALLTQEGRIFKGCNIENACYPLGICAERTAIQKAVSEGYKDFRAIAIASDMQDDFISPCGACRQVMREFGTNWPVYMTKPDGTYIVMTVQELLPSSFGPEDLQKTQ

SEQ ID NO: 274 - protein, 443 aa, synthetic construct
EVQLVESGGGLVQPGGSLRLSCAASGETFVDHDMDWVRQAPGKGLEWVGRTRNKLGSYTTEYAASVKGRETGRDDSKNSLYLQMNSLKTEDTAVYYCAREPKYWIDFDLWGRGTLVTVSSGGGGSGGGGSGGGGSDIQMTQSPSSLSASVGDRVTITCRASQSISSYLNWYQQKPGKAPKLLIYAASSLQSGVPSRFSGSGSGTDFTLTISSLQPEDFATYYCQQSYIAPYIFGGGTKVEIKGGGGSGGGGSGGGGSGGGGSGGGGSGGGGSGGGGSGGGGSGGGGSGGGGSGGGGSMAQKRPACTLKPECVQQLLVCSQEAKKSAYCPYSHFPVGAALLTQEGRIFKGCNIENACYPLGICAERTAIQKAVSEGYKDFRAIAIASDMQDDFISPCGACRQVMREFGTNWPVYMTKPDGTYIVMTVQELLPSSFGPEDLQKTQ

SEQ ID NO: 275 - protein, 448 aa, synthetic construct
EVQLVESGGGLVQPGGSLRLSCAASGETFVDHDMDWVRQAPGKGLEWVGRTRNKLGSYTTEYAASVKGRETGRDDSKNSLYLQMNSLKTEDTAVYYCAREPKYWIDFDLWGRGTLVTVSSGGGGSGGGGSGGGGSDIQMTQSPSSLSASVGDRVTITCRASQSISSYLNWYQQKPGKAPKLLIYAASSLQSGVPSRFSGSGSGTDFTLTISSLQPEDFATYYCQQSYIAPYIFGGGTKVEIKGGGGSGGGGSGGGGSGGGGSGGGGSGGGGSGGGGSGGGGSGGGGSGGGGSGGGGSGGGGSMAQKRPACTLKPECVQQLLVCSQEAKKSAYCPYSHFPVGAALLTQEGRIFKGCNIENACYPLGICAERTAIQKAVSEGYKDFRAIAIASDMQDDFISPCGACRQVMREFGTNWPVYMTKPDGTYIVMTVQELLPSSFGPEDLQKTQ

SEQ ID NO: 276 - protein, 397 aa, synthetic construct
EVQLLESGGGLVQPGGSLRLSCAASGETFSNYAMSWVRQAPGKGLEWVSAISGSGGSTYYADSVKGRFTISRDNSKNTLYLQMNSLRAEDTAVYYCAKGPPTYHTNYYYMDVWGKGTTVTVSSGGGGSGGGGSGGGGSDIQMTQSPSSVSASVGDRVTITCRASQGISSWLAWYQQKPGKAPKLLLIYAASSLQSGVPSRFSGSGSGTDFTLTISSLQPEDFATYYCQQTNSFPYTFGGGTKVEIKGGGGSMAQKRPACTLKPECVQQLLVCSQEAKKSAYCPYSHFPVGAALLTQEGRIFKGCNIENACYPLGICAERTAIQKAVSEGYKDFRAIAIASDMQDDFISPCGACRQVMREFGTNWPVYMTKPDGTYIVMTVQELLPSSFGPEDLQKTQ

SEQ ID NO: 277 - protein, 407 aa, synthetic construct
EVQLLESGGGLVQPGGSLRLSCAASGETFSNYAMSWVRQAPGKGLEWVSAISGSGGSTYYADSVKGRFTISRDNSKNTLYLQMNSLRAEDTAVYYCAKGPPTYHTNYYYMDVWGKGTTVTVSSGGGGSGGGGSGGGGSDIQMTQSPSSVSASVGDRVTITCRASQGISSWLAWYQQKPGKAPKLLLIYAASSLQSGVPSRFSGSGSGTDFTLTISSLQPEDFATYYCQQTNSFPYTFGGGTKVEIKGGGGSGGGGSGGGGSMAQKRPACTLKPECVQQLLVCSQEAKKSAYCPYSHFPVGAALLTQEGRIFKGCNIENACYPLGICAERTAIQKAVSEGYKDFRAIAIASDMQDDFISPCGACRQVMREFGTNWPVYMTKPDGTYIVMTVQELLPSSFGPEDLQKTQ

SEQ ID NO: 278 - protein, 412 aa, synthetic construct
EVQLLESGGGLVQPGGSLRLSCAASGETFSNYAMSWVRQAPGKGLEWVSAISGSGGSTYYADSVKGRFTISRDNSKNTLYLQMNSLRAEDTAVYYCAKGPPTYHTNYYYMDVWGKGTTVTVSSGGGGSGGGGSGGGGSDIQMTQSPSSVSASVGDRVTITCRASQGISSWLAWYQQKPGKAPKLLLIYAASSLQSGVPSRFSGSGSGTDFTLTISSLQPEDFATYYCQQTNSFPYTFGGGTKVEIKGGGGSGGGGSGGGGSGGGGSMAQKRPACTLKPECVQQLLVCSQEAKKSAYCPYSHFPVGAALLTQEGRIFKGCNIENACYPLGICAERTAIQKAVSEGYKDFRAIAIASDMQDDFISPCGACRQVMREFGTNWPVYMTKPDGTYIVMTVQELLPSSFGPEDLQKTQ

SEQ ID NO: 279 - protein, 417 aa, synthetic construct
EVQLLESGGGLVQPGGSLRLSCAASGETFSNYAMSWVRQAPGKGLEWVSAISGSGGSTYYADSVKGRFTISRDNSKNTLYLQMNSLRAEDTAVYYCAKGPPTYHTNYYYMDVWGKGTTVTVSSGGGGSGGGGSGGGGSDIQMTQSPSSVSASVGDRVTITCRASQGISSWLAWYQQKPGKAPKLLLIYAASSLQSGVPSRFSGSGSGTDFTLTISSLQPEDFATYYCQQTNSFPYTFGGGTKVEIKGGGGSGGGGSGGGGSGGGGSGGGGSMAQKRPACTLKPECVQQLLVCSQEAKKSAYCPYSHFPVGAALLTQEGRIFKGCNIENACYPLGICAERTAIQKAVSEGYKDFRAIAIASDMQDDFISPCGACRQVMREFGTNWPVYMTKPDGTYIVMTVQELLPSSFGPEDLQKTQ

SEQ ID NO: 280 - protein, 422 aa, synthetic construct
EVQLLESGGGLVQPGGSLRLSCAASGETFSNYAMSWVRQAPGKGLEWVSAISGSGGSTYYADSVKGRFTISRDNSKNTLYLQMNSLRAEDTAVYYCAKGPPTYHTNYYYMDVWGKGTTVTVSSGGGGSGGGGSGGGGSDIQMTQSPSSVSASVGDRVTITCRASQGISSWLAWYQQKPGKAPKLLLIYAASSLQSGVPSRFSGSGSGTDFTLTISSLQPEDFATYYCQQTNSFPYTFGGGTKVEIKGGGGSGGGGSGGGGSGGGGSGGGGSGGGGSMAQKRPACTLKPECVQQLLVCSQEAKKSAYCPYSHFPVGAALLTQEGRIFKGCNIENACYPLGICAERTAIQKAVSEGYKDFRAIAIASDMQDDFISPCGACRQVMREFGTNWPVYMTKPDGTYIVMTVQELLPSSFGPEDLQKTQ

SEQ ID NO: 281 - protein, 427 aa, synthetic construct
EVQLLESGGGLVQPGGSLRLSCAASGETFSNYAMSWVRQAPGKGLEWVSAISGSGGSTYYADSVKGRFTISRDNSKNTLYLQMNSLRAEDTAVYYCAKGPPTYHTNYYYMDVWGKGTTVTVSSGGGGSGGGGSGGGGSDIQMTQSPSSVSASVGDRVTITCRASQGISSWLAWYQQKPGKAPKLLLIYAASSLQSGVPSRFSGSGSGTDFTLTISSLQPEDFATYYCQQTNSFPYTFGGGTKVEIKGGGGSGGGGSGGGGSGGGGSGGGGSGGGGSGGGGSMAQKRPACTLKPECVQQLLVCSQEAKKSAYCPYSHFPVGAALLTQEGRIFKGCNIENACYPLGICAERTAIQKAVSEGYKDFRAIAIASDMQDDFISPCGACRQVMREFGTNWPVYMTKPDGTYIVMTVQELLPSSFGPEDLQKTQ

SEQ ID NO: 282 - protein, 432 aa, synthetic construct
EVQLLESGGGLVQPGGSLRLSCAASGETFSNYAMSWVRQAPGKGLEWVSAISGSGGSTYYADSVKGRFTISRDNSKNTLYLQMNSLRAEDTAVYYCAKGPPTYHTNYYYMDVWGKGTTVTVSSGGGGSGGGGSGGGGSDIQMTQSPSSVSASVGDRVTITCRASQGISSWLAWYQQKPGKAPKLLLIYAASSLQSGVPSRFSGSGSGTDFTLTISSLQPEDFATYYCQQTNSFPYTFGGGTKVEIKGGGGSGGGGSGGGGSGGGGSGGGGSGGGGSGGGGSGGGGSMAQKRPACTLKPECVQQLLVCSQEAKKSAYCPYSHFPVGAALLTQEGRIFKGCNIENACYPLGICAERTAIQKAVSEGYKDFRAIAIASDMQDDFISPCGACRQVMREFGTNWPVYMTKPDGTYIVMTVQELLPSSFGPEDLQKTQ

SEQ ID NO: 283 - protein, 437 aa, synthetic construct
EVQLLESGGGLVQPGGSLRLSCAASGETFSNYAMSWVRQAPGKGLEWVSAISGSGGSTYYADSVKGRFTISRDNSKNTLYLQMNSLRAEDTAVYYCAKGPPTYHTNYYYMDVWGKGTTVTVSSGGGGSGGGGSGGGGSDIQMTQSPSSVSASVGDRVTITCRASQGISSWLAWYQQKPGKAPKLLLIYAASSLQSGVPSRFSGSGSGTDFTLTISSLQPEDFATYYCQQTNSFPYTFGGGTKVEIKGGGGSGGGGSGGGGSGGGGSGGGGSGGGGSGGGGSGGGGSGGGGSMAQKRPACTLKPECVQQLLVCSQEAKKSAYCPYSHFPVGAALLTQEGRIFKGCNIENACYPLGICAERTAIQKAVSEGYKDFRAIAIASDMQDDFISPCGACRQVMREFGTNWPVYMTKPDGTYIVMTVQELLPSSFGPEDLQKTQ

SEQ ID NO: 284 - protein, 442 aa, synthetic construct
EVQLLESGGGLVQPGGSLRLSCAASGETFSNYAMSWVRQAPGKGLEWVSAISGSGGSTYYADSVKGRFTISRDNSKNTLYLQMNSLRAEDTAVYYCAKGPPTYHTNYYYMDVWGKGTTVTVSSGGGGSGGGGSGGGGSDIQMTQSPSSVSASVGDRVTITCRASQGISSWLAWYQQKPGKAPKLLLIYAASSLQSGVPSRFSGSGSGTDFTLTISSLQPEDFATYYCQQTNSFPYTFGGGTKVEIKGGGGSGGGGSGGGGSGGGGSGGGGSGGGGSGGGGSGGGGSGGGGSGGGGSMAQKRPACTLKPECVQQLLVCSQEAKKSAYCPYSHFPVGAALLTQEGRIFKGCNIENACYPLGICAERTAIQKAVSEGYKDFRAIAIASDMQDDFISPCGACRQVMREFGTNWPVYMTKPDGTYIVMTVQELLPSSFGPEDLQKTQ

SEQ ID NO: 285 - protein, 447 aa, synthetic construct
EVQLLESGGGLVQPGGSLRLSCAASGETFSNYAMSWVRQAPGKGLEWVSAISGSGGSTYYADSVKGRFTISRDNSKNTLYLQMNSLRAEDTAVYYCAKGPPTYHTNYYYMDVWGKGTTVTVSSGGGGSGGGGSGGGGSDIQMTQSPSSVSASVGDRVTITCRASQGISSWLAWYQQKPGKAPKLLLIYAASSLQSGVPSRFSGSGSGTDFTLTISSLQPEDFATYYCQQTNSFPYTFGGGTKVEIKGGGGSGGGGSGGGGSGGGGSGGGGSGGGGSGGGGSGGGGSGGGGSGGGGSGGGGSMAQKRPACTLKPECVQQLLVCSQEAKKSAYCPYSHFPVGAALLTQEGRIFKGCNIENACYPLGICAERTAIQKAVSEGYKDFRAIAIASDMQDDFISPCGACRQVMREFGTNWPVYMTKPDGTYIVMTVQELLPSSFGPEDLQKTQ

SEQ ID NO: 286 - protein, 452 aa, synthetic construct
EVQLLESGGGLVQPGGSLRLSCAASGETFSNYAMSWVRQAPGKGLEWVSAISGSGGSTYYADSVKGRFTISRDNSKNTLYLQMNSLRAEDTAVYYCAKGPPTYHTNYYYMDVWGKGTTVTVSSGGGGSGGGGSGGGGSDIQMTQSPSSVSASVGDRVTITCRASQGISSWLAWYQQKPGKAPKLLLIYAASSLQSGVPSRFSGSGSGTDFTLTISSLQPEDFATYYCQQTNSFPYTFGGGTKVEIKGGGGSGGGGSGGGGSGGGGSGGGGSGGGGSGGGGSGGGGSGGGGSGGGGSGGGGSGGGGSMAQKRPACTLKPECVQQLLVCSQEAKKSAYCPYSHFPVGAALLTQEGRIFKGCNIENACYPLGICAERTAIQKAVSEGYKDFRAIAIASDMQDDFISPCGACRQVMREFGTNWPVYMTKPDGTYIVMTVQELLPSSFGPEDLQKTQ

SEQ ID NO: 287 - protein, 397 aa, synthetic construct
EVQLLESGGGLVQPGGSLRLSCAASGETESSYVMIWVRQAPGKGLEWVSSISGDSVTTYYADSVKGRFTISRDNSKNTLYLOMNSLRAEDTAVYYCAKGPPTYHTNYYYMDVWGKGTTVTVSSGGGGSGGGGSGGGGSDIQMTQSPSSVSASVGDRVTITCRASQGISSWLAWYQQKPGKAPKLLIYAASSLOQSGVPSRFSGSGSGTDFTLTISSLQPEDFATYYCQQTNSEPYTFGGGTKVEIKGGGGSMAQKRPACTLKPECVQQLLVCSQEAKKSAYCPYSHFPVGAALLTQEGRIFKGCNIENACYPLGICAERTAIQKAVSEGYKDFRAIAIASDMQDDFISPCGACRQVMREFGTNWPVYMTKPDGTYIVMTVQELLPSSFGPEDLQKTQ

SEQ ID NO: 288 - protein, 407 aa, synthetic construct
EVQLLESGGGLVQPGGSLRLSCAASGETESSYVMIWVRQAPGKGLEWVSSISGDSVTTYYADSVKGRFTISRDNSKNTLYLOMNSLRAEDTAVYYCAKGPPTYHTNYYYMDVWGKGTTVTVSSGGGGSGGGGSGGGGSDIQMTQSPSSVSASVGDRVTITCRASQGISSWLAWYQQKPGKAPKLLIYAASSLOQSGVPSRFSGSGSGTDFTLTISSLQPEDFATYYCQQTNSEPYTFGGGTKVEIKGGGGSGGGGSGGGGSMAQKRPACTLKPECVQQLLVCSQEAKKSAYCPYSHFPVGAALLTQEGRIFKGCNIENACYPLGICAERTAIQKAVSEGYKDFRAIAIASDMQDDFISPCGACRQVMREFGTNWPVYMTKPDGTYIVMTVQELLPSSFGPEDLQKTQ

SEQ ID NO: 289 - protein, 412 aa, synthetic construct
EVQLLESGGGLVQPGGSLRLSCAASGETESSYVMIWVRQAPGKGLEWVSSISGDSVTTYYADSVKGRFTISRDNSKNTLYLOMNSLRAEDTAVYYCAKGPPTYHTNYYYMDVWGKGTTVTVSSGGGGSGGGGSGGGGSDIQMTQSPSSVSASVGDRVTITCRASQGISSWLAWYQQKPGKAPKLLIYAASSLOQSGVPSRFSGSGSGTDFTLTISSLQPEDFATYYCQQTNSEPYTFGGGTKVEIKGGGGSGGGGSGGGGSGGGGSMAQKRPACTLKPECVQQLLVCSQEAKKSAYCPYSHFPVGAALLTQEGRIFKGCNIENACYPLGICAERTAIQKAVSEGYKDFRAIAIASDMQDDFISPCGACRQVMREFGTNWPVYMTKPDGTYIVMTVQELLPSSFGPEDLQKTQ

SEQ ID NO: 290 - protein, 417 aa, synthetic construct
EVQLLESGGGLVQPGGSLRLSCAASGETESSYVMIWVRQAPGKGLEWVSSISGDSVTTYYADSVKGRFTISRDNSKNTLYLOMNSLRAEDTAVYYCAKGPPTYHTNYYYMDVWGKGTTVTVSSGGGGSGGGGSGGGGSDIQMTQSPSSVSASVGDRVTITCRASQGISSWLAWYQQKPGKAPKLLIYAASSLOQSGVPSRFSGSGSGTDFTLTISSLQPEDFATYYCQQTNSEPYTFGGGTKVEIKGGGGSGGGGSGGGGSGGGGSGGGGSMAQKRPACTLKPECVQQLLVCSQEAKKSAYCPYSHFPVGAALLTQEGRIFKGCNIENACYPLGICAERTAIQKAVSEGYKDFRAIAIASDMQDDFISPCGACRQVMREFGTNWPVYMTKPDGTYIVMTVQELLPSSFGPEDLQKTQ

SEQ ID NO: 291 - protein, 422 aa, synthetic construct
EVQLLESGGGLVQPGGSLRLSCAASGETESSYVMIWVRQAPGKGLEWVSSISGDSVTTYYADSVKGRFTISRDNSKNTLYLOMNSLRAEDTAVYYCAKGPPTYHTNYYYMDVWGKGTTVTVSSGGGGSGGGGSGGGGSDIQMTQSPSSVSASVGDRVTITCRASQGISSWLAWYQQKPGKAPKLLIYAASSLOQSGVPSRFSGSGSGTDFTLTISSLQPEDFATYYCQQTNSEPYTFGGGTKVEIKGGGGSGGGGSGGGGSGGGGSGGGGSGGGGSMAQKRPACTLKPECVQQLLVCSQEAKKSAYCPYSHFPVGAALLTQEGRIFKGCNIENACYPLGICAERTAIQKAVSEGYKDFRAIAIASDMQDDFISPCGACRQVMREFGTNWPVYMTKPDGTYIVMTVQELLPSSFGPEDLQKTQ

SEQ ID NO: 292 - protein, 427 aa, synthetic construct
EVQLLESGGGLVQPGGSLRLSCAASGETESSYVMIWVRQAPGKGLEWVSSISGDSVTTYYADSVKGRFTISRDNSKNTLYLOMNSLRAEDTAVYYCAKGPPTYHTNYYYMDVWGKGTTVTVSSGGGGSGGGGSGGGGSDIQMTQSPSSVSASVGDRVTITCRASQGISSWLAWYQQKPGKAPKLLIYAASSLOQSGVPSRFSGSGSGTDFTLTISSLQPEDFATYYCQQTNSEPYTFGGGTKVEIKGGGGSGGGGSGGGGSGGGGSGGGGSGGGGSGGGGSMAQKRPACTLKPECVQQLLVCSQEAKKSAYCPYSHFPVGAALLTQEGRIFKGCNIENACYPLGICAERTAIQKAVSEGYKDFRAIAIASDMQDDFISPCGACRQVMREFGTNWPVYMTKPDGTYIVMTVQELLPSSFGPEDLQKTQ

SEQ ID NO: 293 - protein, 432 aa, synthetic construct
EVQLLESGGGLVQPGGSLRLSCAASGETESSYVMIWVRQAPGKGLEWVSSISGDSVTTYYADSVKGRFTISRDNSKNTLYLOMNSLRAEDTAVYYCAKGPPTYHTNYYYMDVWGKGTTVTVSSGGGGSGGGGSGGGGSDIQMTQSPSSVSASVGDRVTITCRASQGISSWLAWYQQKPGKAPKLLIYAASSLOQSGVPSRFSGSGSGTDFTLTISSLQPEDFATYYCQQTNSEPYTFGGGTKVEIKGGGGSGGGGSGGGGSGGGGSGGGGSGGGGSGGGGSGGGGSMAQKRPACTLKPECVQQLLVCSQEAKKSAYCPYSHFPVGAALLTQEGRIFKGCNIENACYPLGICAERTAIQKAVSEGYKDFRAIAIASDMQDDFISPCGACRQVMREFGTNWPVYMTKPDGTYIVMTVQELLPSSFGPEDLQKTQ

SEQ ID NO: 294 - protein, 437 aa, synthetic construct
EVQLLESGGGLVQPGGSLRLSCAASGETESSYVMIWVRQAPGKGLEWVSSISGDSVTTYYADSVKGRFTISRDNSKNTLYLOMNSLRAEDTAVYYCAKGPPTYHTNYYYMDVWGKGTTVTVSSGGGGSGGGGSGGGGSDIQMTQSPSSVSASVGDRVTITCRASQGISSWLAWYQQKPGKAPKLLIYAASSLOQSGVPSRFSGSGSGTDFTLTISSLQPEDFATYYCQQTNSEPYTFGGGTKVEIKGGGGSGGGGSGGGGSGGGGSGGGGSGGGGSGGGGSGGGGSGGGGSMAQKRPACTLKPECVQQLLVCSQEAKKSAYCPYSHFPVGAALLTQEGRIFKGCNIENACYPLGICAERTAIQKAVSEGYKDFRAIAIASDMQDDFISPCGACRQVMREFGTNWPVYMTKPDGTYIVMTVQELLPSSFGPEDLQKTQ

SEQ ID NO: 295 - protein, 442 aa, synthetic construct
EVQLLESGGGLVQPGGSLRLSCAASGETESSYVMIWVRQAPGKGLEWVSSISGDSVTTYYADSVKGRFTISRDNSKNTLYLOMNSLRAEDTAVYYCAKGPPTYHTNYYYMDVWGKGTTVTVSSGGGGSGGGGSGGGGSDIQMTQSPSSVSASVGDRVTITCRASQGISSWLAWYQQKPGKAPKLLIYAASSLOQSGVPSRFSGSGSGTDFTLTISSLQPEDFATYYCQQTNSEPYTFGGGTKVEIKGGGGSGGGGSGGGGSGGGGSGGGGSGGGGSGGGGSGGGGSGGGGSGGGGSMAQKRPACTLKPECVQQLLVCSQEAKKSAYCPYSHFPVGAALLTQEGRIFKGCNIENACYPLGICAERTAIQKAVSEGYKDFRAIAIASDMQDDFISPCGACRQVMREFGTNWPVYMTKPDGTYIVMTVQELLPSSFGPEDLQKTQ

SEQ ID NO: 296 - protein, 447 aa, synthetic construct
EVQLLESGGGLVQPGGSLRLSCAASGETESSYVMIWVRQAPGKGLEWVSSISGDSVTTYYADSVKGRFTISRDNSKNTLYLOMNSLRAEDTAVYYCAKGPPTYHTNYYYMDVWGKGTTVTVSSGGGGSGGGGSGGGGSDIQMTQSPSSVSASVGDRVTITCRASQGISSWLAWYQQKPGKAPKLLIYAASSLOQSGVPSRFSGSGSGTDFTLTISSLQPEDFATYYCQQTNSEPYTFGGGTKVEIKGGGGSGGGGSGGGGSGGGGSGGGGSGGGGSGGGGSGGGGSGGGGSGGGGSGGGGSMAQKRPACTLKPECVQQLLVCSQEAKKSAYCPYSHFPVGAALLTQEGRIFKGCNIENACYPLGICAERTAIQKAVSEGYKDFRAIAIASDMQDDFISPCGACRQVMREFGTNWPVYMTKPDGTYIVMTVQELLPSSFGPEDLQKTQ

SEQ ID NO: 297 - protein, 452 aa, synthetic construct
EVQLLESGGGLVQPGGSLRLSCAASGETESSYVMIWVRQAPGKGLEWVSSISGDSVTTYYADSVKGRFTISRDNSKNTLYLOMNSLRAEDTAVYYCAKGPPTYHTNYYYMDVWGKGTTVTVSSGGGGSGGGGSGGGGSDIQMTQSPSSVSASVGDRVTITCRASQGISSWLAWYQQKPGKAPKLLIYAASSLOQSGVPSRFSGSGSGTDFTLTISSLQPEDFATYYCQQTNSEPYTFGGGTKVEIKGGGGSGGGGSGGGGSGGGGSGGGGSGGGGSGGGGSGGGGSGGGGSGGGGSGGGGSGGGGSMAQKRPACTLKPECVQQLLVCSQEAKKSAYCPYSHFPVGAALLTQEGRIFKGCNIENACYPLGICAERTAIQKAVSEGYKDFRAIAIASDMQDDFISPCGACRQVMREFGTNWPVYMTKPDGTYIVMTVQELLPSSFGPEDLQKTQ

SEQ ID NO: 298 - protein, 416 aa, synthetic construct
EVQLVESGGGLVQPGGSLRLSCAASGETFSDHYMDWVRQAPGKGLASGETFSDHYMDWVRQAPGKGLEWVGRIRNKASSYTTEYAASVKGRFTISRDDSKNSLYLQMNSLKTEDTAVYYCAREPKYWIDFDLWGRGTLVTVSSGGGGSGGGGSGGGGSDIQMTQSPSSLSASVGDRVTITCRASQSISSYLNWYQQKPGKAPKLLIYAASSLQSGVPSRFSGSGSGTDFTLTISSLQPEDFATYYCQQSYIAPYTFGGGTKVEIKGGGGSMAQKRPACTLKPECVQQLLVCSQEAKKSAYCPYSHFPVGAALLTQEGRIFKGCNIENACYPLGICAERTAIQKAVSEGYKDFRAIAIASDMQDDFISPCGACRQVMREFGTNWPVYMTKPDGTYIVMTVQELLPSSFGPEDLQKTQ

SEQ ID NO: 299 - protein, 426 aa, synthetic construct
EVQLVESGGGLVQPGGSLRLSCAASGETFSDHYMDWVRQAPGKGLASGETFSDHYMDWVRQAPGKGLEWVGRIRNKASSYTTEYAASVKGRFTISRDDSKNSLYLQMNSLKTEDTAVYYCAREPKYWIDFDLWGRGTLVTVSSGGGGSGGGGSGGGGSDIQMTQSPSSLSASVGDRVTITCRASQSISSYLNWYQQKPGKAPKLLIYAASSLQSGVPSRFSGSGSGTDFTLTISSLQPEDFATYYCQQSYIAPYTFGGGTKVEIKGGGGSGGGGSGGGGSMAQKRPACTLKPECVQQLLVCSQEAKKSAYCPYSHFPVGAALLTQEGRIFKGCNIENACYPLGICAERTAIQKAVSEGYKDFRAIAIASDMQDDFISPCGACRQVMREFGTNWPVYMTKPDGTYIVMTVQELLPSSFGPEDLQKTQ

SEQ ID NO: 300 - protein, 431 aa, synthetic construct
EVQLVESGGGLVQPGGSLRLSCAASGETFSDHYMDWVRQAPGKGLASGETFSDHYMDWVRQAPGKGLEWVGRIRNKASSYTTEYAASVKGRFTISRDDSKNSLYLQMNSLKTEDTAVYYCAREPKYWIDFDLWGRGTLVTVSSGGGGSGGGGSGGGGSDIQMTQSPSSLSASVGDRVTITCRASQSISSYLNWYQQKPGKAPKLLIYAASSLQSGVPSRFSGSGSGTDFTLTISSLQPEDFATYYCQQSYIAPYTFGGGTKVEIKGGGGSGGGGSGGGGSGGGGSMAQKRPACTLKPECVQQLLVCSQEAKKSAYCPYSHFPVGAALLTQEGRIFKGCNIENACYPLGICAERTAIQKAVSEGYKDFRAIAIASDMQDDFISPCGACRQVMREFGTNWPVYMTKPDGTYIVMTVQELLPSSFGPEDLQKTQ

SEQ ID NO: 301 - protein, 436 aa, synthetic construct
EVQLVESGGGLVQPGGSLRLSCAASGETFSDHYMDWVRQAPGKGLASGETFSDHYMDWVRQAPGKGLEWVGRIRNKASSYTTEYAASVKGRFTISRDDSKNSLYLQMNSLKTEDTAVYYCAREPKYWIDFDLWGRGTLVTVSSGGGGSGGGGSGGGGSDIQMTQSPSSLSASVGDRVTITCRASQSISSYLNWYQQKPGKAPKLLIYAASSLQSGVPSRFSGSGSGTDFTLTISSLQPEDFATYYCQQSYIAPYTFGGGTKVEIKGGGGSGGGGSGGGGSGGGGSGGGGSMAQKRPACTLKPECVQQLLVCSQEAKKSAYCPYSHFPVGAALLTQEGRIFKGCNIENACYPLGICAERTAIQKAVSEGYKDFRAIAIASDMQDDFISPCGACRQVMREFGTNWPVYMTKPDGTYIVMTVQELLPSSFGPEDLQKTQ

SEQ ID NO: 302 - protein, 441 aa, synthetic construct
EVQLVESGGGLVQPGGSLRLSCAASGETFSDHYMDWVRQAPGKGLASGETFSDHYMDWVRQAPGKGLEWVGRIRNKASSYTTEYAASVKGRFTISRDDSKNSLYLQMNSLKTEDTAVYYCAREPKYWIDFDLWGRGTLVTVSSGGGGSGGGGSGGGGSDIQMTQSPSSLSASVGDRVTITCRASQSISSYLNWYQQKPGKAPKLLIYAASSLQSGVPSRFSGSGSGTDFTLTISSLQPEDFATYYCQQSYIAPYTFGGGTKVEIKGGGGSGGGGSGGGGSGGGGSGGGGSGGGGSMAQKRPACTLKPECVQQLLVCSQEAKKSAYCPYSHFPVGAALLTQEGRIFKGCNIENACYPLGICAERTAIQKAVSEGYKDFRAIAIASDMQDDFISPCGACRQVMREFGTNWPVYMTKPDGTYIVMTVQELLPSSFGPEDLQKTQ

SEQ ID NO: 303 - protein, 446 aa, synthetic construct
EVQLVESGGGLVQPGGSLRLSCAASGETFSDHYMDWVRQAPGKGLASGETFSDHYMDWVRQAPGKGLEWVGRIRNKASSYTTEYAASVKGRFTISRDDSKNSLYLQMNSLKTEDTAVYYCAREPKYWIDFDLWGRGTLVTVSSGGGGSGGGGSGGGGSDIQMTQSPSSLSASVGDRVTITCRASQSISSYLNWYQQKPGKAPKLLIYAASSLQSGVPSRFSGSGSGTDFTLTISSLQPEDFATYYCQQSYIAPYTFGGGTKVEIKGGGGSGGGGSGGGGSGGGGSGGGGSGGGGSGGGGSMAQKRPACTLKPECVQQLLVCSQEAKKSAYCPYSHFPVGAALLTQEGRIFKGCNIENACYPLGICAERTAIQKAVSEGYKDFRAIAIASDMQDDFISPCGACRQVMREFGTNWPVYMTKPDGTYIVMTVQELLPSSFGPEDLQKTQ

SEQ ID NO: 304 - protein, 451 aa, synthetic construct
EVQLVESGGGLVQPGGSLRLSCAASGETFSDHYMDWVRQAPGKGLASGETFSDHYMDWVRQAPGKGLEWVGRIRNKASSYTTEYAASVKGRFTISRDDSKNSLYLQMNSLKTEDTAVYYCAREPKYWIDFDLWGRGTLVTVSSGGGGSGGGGSGGGGSDIQMTQSPSSLSASVGDRVTITCRASQSISSYLNWYQQKPGKAPKLLIYAASSLQSGVPSRFSGSGSGTDFTLTISSLQPEDFATYYCQQSYIAPYTFGGGTKVEIKGGGGSGGGGSGGGGSGGGGSGGGGSGGGGSGGGGSGGGGSMAQKRPACTLKPECVQQLLVCSQEAKKSAYCPYSHFPVGAALLTQEGRIFKGCNIENACYPLGICAERTAIQKAVSEGYKDFRAIAIASDMQDDFISPCGACRQVMREFGTNWPVYMTKPDGTYIVMTVQELLPSSFGPEDLQKTQ

SEQ ID NO: 305 - protein, 456 aa, synthetic construct
EVQLVESGGGLVQPGGSLRLSCAASGETFSDHYMDWVRQAPGKGLASGETFSDHYMDWVRQAPGKGLEWVGRIRNKASSYTTEYAASVKGRFTISRDDSKNSLYLQMNSLKTEDTAVYYCAREPKYWIDFDLWGRGTLVTVSSGGGGSGGGGSGGGGSDIQMTQSPSSLSASVGDRVTITCRASQSISSYLNWYQQKPGKAPKLLIYAASSLQSGVPSRFSGSGSGTDFTLTISSLQPEDFATYYCQQSYIAPYTFGGGTKVEIKGGGGSGGGGSGGGGSGGGGSGGGGSGGGGSGGGGSGGGGSGGGGSMAQKRPACTLKPECVQQLLVCSQEAKKSAYCPYSHFPVGAALLTQEGRIFKGCNIENACYPLGICAERTAIQKAVSEGYKDFRAIAIASDMQDDFISPCGACRQVMREFGTNWPVYMTKPDGTYIVMTVQELLPSSFGPEDLQKTQ

SEQ ID NO: 306 - protein, 461 aa, synthetic construct
EVQLVESGGGLVQPGGSLRLSCAASGETFSDHYMDWVRQAPGKGLASGETFSDHYMDWVRQAPGKGLEWVGRIRNKASSYTTEYAASVKGRFTISRDDSKNSLYLQMNSLKTEDTAVYYCAREPKYWIDFDLWGRGTLVTVSSGGGGSGGGGSGGGGSDIQMTQSPSSLSASVGDRVTITCRASQSISSYLNWYQQKPGKAPKLLIYAASSLQSGVPSRFSGSGSGTDFTLTISSLQPEDFATYYCQQSYIAPYTFGGGTKVEIKGGGGSGGGGSGGGGSGGGGSGGGGSGGGGSGGGGSGGGGSGGGGSGGGGSMAQKRPACTLKPECVQQLLVCSQEAKKSAYCPYSHFPVGAALLTQEGRIFKGCNIENACYPLGICAERTAIQKAVSEGYKDFRAIAIASDMQDDFISPCGACRQVMREFGTNWPVYMTKPDGTYIVMTVQELLPSSFGPEDLQKTQ

SEQ ID NO: 307 - protein, 466 aa, synthetic construct
EVQLVESGGGLVQPGGSLRLSCAASGETFSDHYMDWVRQAPGKGLASGETFSDHYMDWVRQAPGKGLEWVGRIRNKASSYTTEYAASVKGRFTISRDDSKNSLYLQMNSLKTEDTAVYYCAREPKYWIDFDLWGRGTLVTVSSGGGGSGGGGSGGGGSDIQMTQSPSSLSASVGDRVTITCRASQSISSYLNWYQQKPGKAPKLLIYAASSLQSGVPSRFSGSGSGTDFTLTISSLQPEDFATYYCQQSYIAPYTFGGGTKVEIKGGGGSGGGGSGGGGSGGGGSGGGGSGGGGSGGGGSGGGGSGGGGSGGGGSGGGGSMAQKRPACTLKPECVQQLLVCSQEAKKSAYCPYSHFPVGAALLTQEGRIFKGCNIENACYPLGICAERTAIQKAVSEGYKDFRAIAIASDMQDDFISPCGACRQVMREFGTNWPVYMTKPDGTYIVMTVQELLPSSFGPEDLQKTQ

SEQ ID NO: 308 - protein, 471 aa, synthetic construct
EVQLVESGGGLVQPGGSLRLSCAASGETFSDHYMDWVRQAPGKGLASGETFSDHYMDWVRQAPGKGLEWVGRIRNKASSYTTEYAASVKGRFTISRDDSKNSLYLQMNSLKTEDTAVYYCAREPKYWIDFDLWGRGTLVTVSSGGGGSGGGGSGGGGSDIQMTQSPSSLSASVGDRVTITCRASQSISSYLNWYQQKPGKAPKLLIYAASSLQSGVPSRFSGSGSGTDFTLTISSLQPEDFATYYCQQSYIAPYTFGGGTKVEIKGGGGSGGGGSGGGGSGGGGSGGGGSGGGGSGGGGSGGGGSGGGGSGGGGSGGGGSGGGGSMAQKRPACTLKPECVQQLLVCSQEAKKSAYCPYSHFPVGAALLTQEGRIFKGCNIENACYPLGICAERTAIQKAVSEGYKDFRAIAIASDMQDDFISPCGACRQVMREFGTNWPVYMTKPDGTYIVMTVQELLPSSFGPEDLQKTQ

SEQ ID NO: 309 - protein, 393 aa, synthetic construct
EVQLVESGGGLVQPGRSLRLSCTASGFTFSDHDMNWVRQAPGKGLEWVGRTRNAAGSYTTEYAASVKGRFTISRDDSKNSLYLQMNSLKTEDTAVYYCAREPKYWIDFDLWGRGTLVTSSGGGGSGGGGSGGGGSDIQMTQSPSSLSASVGDRVTITCRASQSISSYLNWYQQKPGKAPKLLIYAASSLQSGVPSRFSGSGSGTDFTLTISSLQPEDFATYYCQQSYIAPYTFGGGTKVEIKGGGGSMAQKRPACTLKPECVQQLLVCSQEAKKSAYCPYSHFPVGAALLTQEGRIFKGCNIENACYPLGICAERTAIQKAVSEGYKDFRAIAIASDMQDDFISPCGACRQVMREFGTNWPVYMTKPDGTYIVMTVQELLPSSFGPEDLQKTQ

SEQ ID NO: 310 - protein, 403 aa, synthetic construct
EVQLVESGGGLVQPGRSLRLSCTASGFTFSDHDMNWVRQAPGKGLEWVGRTRNAAGSYTTEYAASVKGRFTISRDDSKNSLYLQMNSLKTEDTAVYYCAREPKYWIDFDLWGRGTLVTSSGGGGSGGGGSGGGGSDIQMTQSPSSLSASVGDRVTITCRASQSISSYLNWYQQKPGKAPKLLIYAASSLQSGVPSRFSGSGSGTDFTLTISSLQPEDFATYYCQQSYIAPYTFGGGTKVEIKGGGGSGGGGSGGGGSMAQKRPACTLKPECVQQLLVCSQEAKKSAYCPYSHFPVGAALLTQEGRIFKGCNIENACYPLGICAERTAIQKAVSEGYKDFRAIAIASDMQDDFISPCGACRQVMREFGTNWPVYMTKPDGTYIVMTVQELLPSSFGPEDLQKTQ

SEQ ID NO: 311 - protein, 408 aa, synthetic construct
EVQLVESGGGLVQPGRSLRLSCTASGFTFSDHDMNWVRQAPGKGLEWVGRTRNAAGSYTTEYAASVKGRFTISRDDSKNSLYLQMNSLKTEDTAVYYCAREPKYWIDFDLWGRGTLVTSSGGGGSGGGGSGGGGSDIQMTQSPSSLSASVGDRVTITCRASQSISSYLNWYQQKPGKAPKLLIYAASSLQSGVPSRFSGSGSGTDFTLTISSLQPEDFATYYCQQSYIAPYTFGGGTKVEIKGGGGSGGGGSGGGGSGGGGSMAQKRPACTLKPECVQQLLVCSQEAKKSAYCPYSHFPVGAALLTQEGRIFKGCNIENACYPLGICAERTAIQKAVSEGYKDFRAIAIASDMQDDFISPCGACRQVMREFGTNWPVYMTKPDGTYIVMTVQELLPSSFGPEDLQKTQ

SEQ ID NO: 312 - protein, 413 aa, synthetic construct
EVQLVESGGGLVQPGRSLRLSCTASGFTFSDHDMNWVRQAPGKGLEWVGRTRNAAGSYTTEYAASVKGRFTISRDDSKNSLYLQMNSLKTEDTAVYYCAREPKYWIDFDLWGRGTLVTSSGGGGSGGGGSGGGGSDIQMTQSPSSLSASVGDRVTITCRASQSISSYLNWYQQKPGKAPKLLIYAASSLQSGVPSRFSGSGSGTDFTLTISSLQPEDFATYYCQQSYIAPYTFGGGTKVEIKGGGGSGGGGSGGGGSGGGGSGGGGSMAQKRPACTLKPECVQQLLVCSQEAKKSAYCPYSHFPVGAALLTQEGRIFKGCNIENACYPLGICAERTAIQKAVSEGYKDFRAIAIASDMQDDFISPCGACRQVMREFGTNWPVYMTKPDGTYIVMTVQELLPSSFGPEDLQKTQ

SEQ ID NO: 313 - protein, 418 aa, synthetic construct
EVQLVESGGGLVQPGRSLRLSCTASGFTFSDHDMNWVRQAPGKGLEWVGRTRNAAGSYTTEYAASVKGRFTISRDDSKNSLYLQMNSLKTEDTAVYYCAREPKYWIDFDLWGRGTLVTSSGGGGSGGGGSGGGGSDIQMTQSPSSLSASVGDRVTITCRASQSISSYLNWYQQKPGKAPKLLIYAASSLQSGVPSRFSGSGSGTDFTLTISSLQPEDFATYYCQQSYIAPYTFGGGTKVEIKGGGGSGGGGSGGGGSGGGGSGGGGSGGGGSMAQKRPACTLKPECVQQLLVCSQEAKKSAYCPYSHFPVGAALLTQEGRIFKGCNIENACYPLGICAERTAIQKAVSEGYKDFRAIAIASDMQDDFISPCGACRQVMREFGTNWPVYMTKPDGTYIVMTVQELLPSSFGPEDLQKTQ

SEQ ID NO: 314 - protein, 423 aa, synthetic construct
EVQLVESGGGLVQPGRSLRLSCTASGFTFSDHDMNWVRQAPGKGLEWVGRTRNAAGSYTTEYAASVKGRFTISRDDSKNSLYLQMNSLKTEDTAVYYCAREPKYWIDFDLWGRGTLVTSSGGGGSGGGGSGGGGSDIQMTQSPSSLSASVGDRVTITCRASQSISSYLNWYQQKPGKAPKLLIYAASSLQSGVPSRFSGSGSGTDFTLTISSLQPEDFATYYCQQSYIAPYTFGGGTKVEIKGGGGSGGGGSGGGGSGGGGSGGGGSGGGGSGGGGSMAQKRPACTLKPECVQQLLVCSQEAKKSAYCPYSHFPVGAALLTQEGRIFKGCNIENACYPLGICAERTAIQKAVSEGYKDFRAIAIASDMQDDFISPCGACRQVMREFGTNWPVYMTKPDGTYIVMTVQELLPSSFGPEDLQKTQ

SEQ ID NO: 315 - protein, 428 aa, synthetic construct
EVQLVESGGGLVQPGRSLRLSCTASGFTFSDHDMNWVRQAPGKGLEWVGRTRNAAGSYTTEYAASVKGRFTISRDDSKNSLYLQMNSLKTEDTAVYYCAREPKYWIDFDLWGRGTLVTSSGGGGSGGGGSGGGGSDIQMTQSPSSLSASVGDRVTITCRASQSISSYLNWYQQKPGKAPKLLIYAASSLQSGVPSRFSGSGSGTDFTLTISSLQPEDFATYYCQQSYIAPYTFGGGTKVEIKGGGGSGGGGSGGGGSGGGGSGGGGSGGGGSGGGGSGGGGSMAQKRPACTLKPECVQQLLVCSQEAKKSAYCPYSHFPVGAALLTQEGRIFKGCNIENACYPLGICAERTAIQKAVSEGYKDFRAIAIASDMQDDFISPCGACRQVMREFGTNWPVYMTKPDGTYIVMTVQELLPSSFGPEDLQKTQ

SEQ ID NO: 316 - protein, 433 aa, synthetic construct
EVQLVESGGGLVQPGRSLRLSCTASGFTFSDHDMNWVRQAPGKGLEWVGRTRNAAGSYTTEYAASVKGRFTISRDDSKNSLYLQMNSLKTEDTAVYYCAREPKYWIDFDLWGRGTLVTSSGGGGSGGGGSGGGGSDIQMTQSPSSLSASVGDRVTITCRASQSISSYLNWYQQKPGKAPKLLIYAASSLQSGVPSRFSGSGSGTDFTLTISSLQPEDFATYYCQQSYIAPYTFGGGTKVEIKGGGGSGGGGSGGGGSGGGGSGGGGSGGGGSGGGGSGGGGSGGGGSMAQKRPACTLKPECVQQLLVCSQEAKKSAYCPYSHFPVGAALLTQEGRIFKGCNIENACYPLGICAERTAIQKAVSEGYKDFRAIAIASDMQDDFISPCGACRQVMREFGTNWPVYMTKPDGTYIVMTVQELLPSSFGPEDLQKTQ

SEQ ID NO: 317 - protein, 438 aa, synthetic construct
EVQLVESGGGLVQPGRSLRLSCTASGFTFSDHDMNWVRQAPGKGLEWVGRTRNAAGSYTTEYAASVKGRFTISRDDSKNSLYLQMNSLKTEDTAVYYCAREPKYWIDFDLWGRGTLVTSSGGGGSGGGGSGGGGSDIQMTQSPSSLSASVGDRVTITCRASQSISSYLNWYQQKPGKAPKLLIYAASSLQSGVPSRFSGSGSGTDFTLTISSLQPEDFATYYCQQSYIAPYTFGGGTKVEIKGGGGSGGGGSGGGGSGGGGSGGGGSGGGGSGGGGSGGGGSGGGGSGGGGSMAQKRPACTLKPECVQQLLVCSQEAKKSAYCPYSHFPVGAALLTQEGRIFKGCNIENACYPLGICAERTAIQKAVSEGYKDFRAIAIASDMQDDFISPCGACRQVMREFGTNWPVYMTKPDGTYIVMTVQELLPSSFGPEDLQKTQ

SEQ ID NO: 318 - protein, 443 aa, synthetic construct
EVQLVESGGGLVQPGRSLRLSCTASGFTFSDHDMNWVRQAPGKGLEWVGRTRNAAGSYTTEYAASVKGRFTISRDDSKNSLYLQMNSLKTEDTAVYYCAREPKYWIDFDLWGRGTLVTSSGGGGSGGGGSGGGGSDIQMTQSPSSLSASVGDRVTITCRASQSISSYLNWYQQKPGKAPKLLIYAASSLQSGVPSRFSGSGSGTDFTLTISSLQPEDFATYYCQQSYIAPYTFGGGTKVEIKGGGGSGGGGSGGGGSGGGGSGGGGSGGGGSGGGGSGGGGSGGGGSGGGGSGGGGSMAQKRPACTLKPECVQQLLVCSQEAKKSAYCPYSHFPVGAALLTQEGRIFKGCNIENACYPLGICAERTAIQKAVSEGYKDFRAIAIASDMQDDFISPCGACRQVMREFGTNWPVYMTKPDGTYIVMTVQELLPSSFGPEDLQKTQ

SEQ ID NO: 319 - protein, 448 aa, synthetic construct
EVQLVESGGGLVQPGRSLRLSCTASGFTFSDHDMNWVRQAPGKGLEWVGRTRNAAGSYTTEYAASVKGRFTISRDDSKNSLYLQMNSLKTEDTAVYYCAREPKYWIDFDLWGRGTLVTSSGGGGSGGGGSGGGGSDIQMTQSPSSLSASVGDRVTITCRASQSISSYLNWYQQKPGKAPKLLIYAASSLQSGVPSRFSGSGSGTDFTLTISSLQPEDFATYYCQQSYIAPYTFGGGTKVEIKGGGGSGGGGSGGGGSGGGGSGGGGSGGGGSGGGGSGGGGSGGGGSGGGGSGGGGSGGGGSMAQKRPACTLKPECVQQLLVCSQEAKKSAYCPYSHFPVGAALLTQEGRIFKGCNIENACYPLGICAERTAIQKAVSEGYKDFRAIAIASDMQDDFISPCGACRQVMREFGTNWPVYMTKPDGTYIVMTVQELLPSSFGPEDLQKTQ

SEQ ID NO: 320 - protein, 393 aa, synthetic construct
DIQMTQSPSSLSASVGDRVTITCRASQSISSYLNWYQQKPGKAPKLLIYAASSLQSGVPSRFSGSGSGTDFTLTISSLQPEDFATYYCQQSYIAPYIFGGGTKVEIKGGGGSGGGGSGGGGSEVQLVESGGGLVQPGGSLRLSCAASGETFVDHDMDWVRQAPGKGLEWVGRTRNKLGSYTTEYAASVKGRETGRDDSKNSLYLQMNSLKTEDTAVYYCAREPKYWIDFDLWGRGTLVTVSSGGGGSMAQKRPACTLKPECVQQLLVCSQEAKKSAYCPYSHFPVGAALLTQEGRIFKGCNIENACYPLGICAERTAIQKAVSEGYKDFRAIAIASDMQDDFISPCGACRQVMREFGTNWPVYMTKPDGTYIVMTVQELLPSSFGPEDLQKTQ

SEQ ID NO: 321 - protein, 403 aa, synthetic construct
DIQMTQSPSSLSASVGDRVTITCRASQSISSYLNWYQQKPGKAPKLLIYAASSLQSGVPSRFSGSGSGTDFTLTISSLQPEDFATYYCQQSYIAPYIFGGGTKVEIKGGGGSGGGGSGGGGSEVQLVESGGGLVQPGGSLRLSCAASGETFVDHDMDWVRQAPGKGLEWVGRTRNKLGSYTTEYAASVKGRETGRDDSKNSLYLQMNSLKTEDTAVYYCAREPKYWIDFDLWGRGTLVTVSSGGGGSGGGGSGGGGSMAQKRPACTLKPECVQQLLVCSQEAKKSAYCPYSHFPVGAALLTQEGRIFKGCNIENACYPLGICAERTAIQKAVSEGYKDFRAIAIASDMQDDFISPCGACRQVMREFGTNWPVYMTKPDGTYIVMTVQELLPSSFGPEDLQKTQ

SEQ ID NO: 322 - protein, 408 aa, synthetic construct
DIQMTQSPSSLSASVGDRVTITCRASQSISSYLNWYQQKPGKAPKLLIYAASSLQSGVPSRFSGSGSGTDFTLTISSLQPEDFATYYCQQSYIAPYIFGGGTKVEIKGGGGSGGGGSGGGGSEVQLVESGGGLVQPGGSLRLSCAASGETFVDHDMDWVRQAPGKGLEWVGRTRNKLGSYTTEYAASVKGRETGRDDSKNSLYLQMNSLKTEDTAVYYCAREPKYWIDFDLWGRGTLVTVSSGGGGSGGGGSGGGGSGGGGSMAQKRPACTLKPECVQQLLVCSQEAKKSAYCPYSHFPVGAALLTQEGRIFKGCNIENACYPLGICAERTAIQKAVSEGYKDFRAIAIASDMQDDFISPCGACRQVMREFGTNWPVYMTKPDGTYIVMTVQELLPSSFGPEDLQKTQ

SEQ ID NO: 323 - protein, 413 aa, synthetic construct
DIQMTQSPSSLSASVGDRVTITCRASQSISSYLNWYQQKPGKAPKLLIYAASSLQSGVPSRFSGSGSGTDFTLTISSLQPEDFATYYCQQSYIAPYIFGGGTKVEIKGGGGSGGGGSGGGGSEVQLVESGGGLVQPGGSLRLSCAASGETFVDHDMDWVRQAPGKGLEWVGRTRNKLGSYTTEYAASVKGRETGRDDSKNSLYLQMNSLKTEDTAVYYCAREPKYWIDFDLWGRGTLVTVSSGGGGSGGGGSGGGGSGGGGSGGGGSMAQKRPACTLKPECVQQLLVCSQEAKKSAYCPYSHFPVGAALLTQEGRIFKGCNIENACYPLGICAERTAIQKAVSEGYKDFRAIAIASDMQDDFISPCGACRQVMREFGTNWPVYMTKPDGTYIVMTVQELLPSSFGPEDLQKTQ

SEQ ID NO: 324 - protein, 418 aa, synthetic construct
DIQMTQSPSSLSASVGDRVTITCRASQSISSYLNWYQQKPGKAPKLLIYAASSLQSGVPSRFSGSGSGTDFTLTISSLQPEDFATYYCQQSYIAPYIFGGGTKVEIKGGGGSGGGGSGGGGSEVQLVESGGGLVQPGGSLRLSCAASGETFVDHDMDWVRQAPGKGLEWVGRTRNKLGSYTTEYAASVKGRETGRDDSKNSLYLQMNSLKTEDTAVYYCAREPKYWIDFDLWGRGTLVTVSSGGGGSGGGGSGGGGSGGGGSGGGGSGGGGSMAQKRPACTLKPECVQQLLVCSQEAKKSAYCPYSHFPVGAALLTQEGRIFKGCNIENACYPLGICAERTAIQKAVSEGYKDFRAIAIASDMQDDFISPCGACRQVMREFGTNWPVYMTKPDGTYIVMTVQELLPSSFGPEDLQKTQ

SEQ ID NO: 325 - protein, 423 aa, synthetic construct
DIQMTQSPSSLSASVGDRVTITCRASQSISSYLNWYQQKPGKAPKLLIYAASSLQSGVPSRFSGSGSGTDFTLTISSLQPEDFATYYCQQSYIAPYIFGGGTKVEIKGGGGSGGGGSGGGGSEVQLVESGGGLVQPGGSLRLSCAASGETFVDHDMDWVRQAPGKGLEWVGRTRNKLGSYTTEYAASVKGRETGRDDSKNSLYLQMNSLKTEDTAVYYCAREPKYWIDFDLWGRGTLVTVSSGGGGSGGGGSGGGGSGGGGSGGGGSGGGGSGGGGSMAQKRPACTLKPECVQQLLVCSQEAKKSAYCPYSHFPVGAALLTQEGRIFKGCNIENACYPLGICAERTAIQKAVSEGYKDFRAIAIASDMQDDFISPCGACRQVMREFGTNWPVYMTKPDGTYIVMTVQELLPSSFGPEDLQKTQ

SEQ ID NO: 326 - protein, 428 aa, synthetic construct
DIQMTQSPSSLSASVGDRVTITCRASQSISSYLNWYQQKPGKAPKLLIYAASSLQSGVPSRFSGSGSGTDFTLTISSLQPEDFATYYCQQSYIAPYIFGGGTKVEIKGGGGSGGGGSGGGGSEVQLVESGGGLVQPGGSLRLSCAASGETFVDHDMDWVRQAPGKGLEWVGRTRNKLGSYTTEYAASVKGRETGRDDSKNSLYLQMNSLKTEDTAVYYCAREPKYWIDFDLWGRGTLVTVSSGGGGSGGGGSGGGGSGGGGSGGGGSGGGGSGGGGSGGGGSMAQKRPACTLKPECVQQLLVCSQEAKKSAYCPYSHFPVGAALLTQEGRIFKGCNIENACYPLGICAERTAIQKAVSEGYKDFRAIAIASDMQDDFISPCGACRQVMREFGTNWPVYMTKPDGTYIVMTVQELLPSSFGPEDLQKTQ

SEQ ID NO: 327 - protein, 433 aa, synthetic construct
DIQMTQSPSSLSASVGDRVTITCRASQSISSYLNWYQQKPGKAPKLLIYAASSLQSGVPSRFSGSGSGTDFTLTISSLQPEDFATYYCQQSYIAPYIFGGGTKVEIKGGGGSGGGGSGGGGSEVQLVESGGGLVQPGGSLRLSCAASGETFVDHDMDWVRQAPGKGLEWVGRTRNKLGSYTTEYAASVKGRETGRDDSKNSLYLQMNSLKTEDTAVYYCAREPKYWIDFDLWGRGTLVTVSSGGGGSGGGGSGGGGSGGGGSGGGGSGGGGSGGGGSGGGGSGGGGSMAQKRPACTLKPECVQQLLVCSQEAKKSAYCPYSHFPVGAALLTQEGRIFKGCNIENACYPLGICAERTAIQKAVSEGYKDFRAIAIASDMQDDFISPCGACRQVMREFGTNWPVYMTKPDGTYIVMTVQELLPSSFGPEDLQKTQ

SEQ ID NO: 328 - protein, 438 aa, synthetic construct
DIQMTQSPSSLSASVGDRVTITCRASQSISSYLNWYQQKPGKAPKLLIYAASSLQSGVPSRFSGSGSGTDFTLTISSLQPEDFATYYCQQSYIAPYIFGGGTKVEIKGGGGSGGGGSGGGGSEVQLVESGGGLVQPGGSLRLSCAASGETFVDHDMDWVRQAPGKGLEWVGRTRNKLGSYTTEYAASVKGRETGRDDSKNSLYLQMNSLKTEDTAVYYCAREPKYWIDFDLWGRGTLVTVSSGGGGSGGGGSGGGGSGGGGSGGGGSGGGGSGGGGSGGGGSGGGGSGGGGSMAQKRPACTLKPECVQQLLVCSQEAKKSAYCPYSHFPVGAALLTQEGRIFKGCNIENACYPLGICAERTAIQKAVSEGYKDFRAIAIASDMQDDFISPCGACRQVMREFGTNWPVYMTKPDGTYIVMTVQELLPSSFGPEDLQKTQ

SEQ ID NO: 329 - protein, 443 aa, synthetic construct
DIQMTQSPSSLSASVGDRVTITCRASQSISSYLNWYQQKPGKAPKLLIYAASSLQSGVPSRFSGSGSGTDFTLTISSLQPEDFATYYCQQSYIAPYIFGGGTKVEIKGGGGSGGGGSGGGGSEVQLVESGGGLVQPGGSLRLSCAASGETFVDHDMDWVRQAPGKGLEWVGRTRNKLGSYTTEYAASVKGRETGRDDSKNSLYLQMNSLKTEDTAVYYCAREPKYWIDFDLWGRGTLVTVSSGGGGSGGGGSGGGGSGGGGSGGGGSGGGGSGGGGSGGGGSGGGGSGGGGSGGGGSMAQKRPACTLKPECVQQLLVCSQEAKKSAYCPYSHFPVGAALLTQEGRIFKGCNIENACYPLGICAERTAIQKAVSEGYKDFRAIAIASDMQDDFISPCGACRQVMREFGTNWPVYMTKPDGTYIVMTVQELLPSSFGPEDLQKTQ

SEQ ID NO: 330 - protein, 448 aa, synthetic construct
DIQMTQSPSSLSASVGDRVTITCRASQSISSYLNWYQQKPGKAPKLLIYAASSLQSGVPSRFSGSGSGTDFTLTISSLQPEDFATYYCQQSYIAPYIFGGGTKVEIKGGGGSGGGGSGGGGSEVQLVESGGGLVQPGGSLRLSCAASGETFVDHDMDWVRQAPGKGLEWVGRTRNKLGSYTTEYAASVKGRETGRDDSKNSLYLQMNSLKTEDTAVYYCAREPKYWIDFDLWGRGTLVTVSSGGGGSGGGGSGGGGSGGGGSGGGGSGGGGSGGGGSGGGGSGGGGSGGGGSGGGGSGGGGSMAQKRPACTLKPECVQQLLVCSQEAKKSAYCPYSHFPVGAALLTQEGRIFKGCNIENACYPLGICAERTAIQKAVSEGYKDFRAIAIASDMQDDFISPCGACRQVMREFGTNWPVYMTKPDGTYIVMTVQELLPSSFGPEDLQKTQ

SEQ ID NO: 331 - protein, 397 aa, synthetic construct
MAQKRPACTLKPECVQQLLVCSQEAKKSAYCPYSHFPVGAALLTQEGRIFKGCNIENACYPLGICAERTAIQKAVSEGYKDFRAIAIASDMQDDFISPCGACRQVMREFGTNWPVYMTKPDGTYIVMTVQELLPSSFGPEDLQKTQGGGGSDIQMTQSPSSVSASVGDRVTITCRASQGISSWLAWYQQKPGKAPKLLLIYAASSLQSGVPSRFSGSGSGTDFTLTISSLQPEDFATYYCQQTNSFPYTFGGGTKVEIKGGGGSGGGGSGGGGSEVQLLESGGGLVQPGGSLRLSCAASGETFSNYAMSWVRQAPGKGLEWVSAISGSGGSTYYADSVKGRFTISRDNSKNTLYLQMNSLRAEDTAVYYCAKGPPTYHTNYYYMDVWGKGTTVTVSS

SEQ ID NO: 332 - protein, 397 aa, synthetic construct
MAQKRPACTLKPECVQQLLVCSQEAKKSAYCPYSHFPVGAALLTQEGRIFKGCNIENACYPLGICAERTAIQKAVSEGYKDFRAIAIASDMQDDFISPCGACRQVMREFGTNWPVYMTKPDGTYIVMTVQELLPSSFGPEDLQKTQGGGGSDIQMTQSPSSVSASVGDRVTITCRASQGISSWLAWYQQKPGKAPKLLIYAASSLOQSGVPSRFSGSGSGTDFTLTISSLQPEDFATYYCQQTNSEPYTFGGGTKVEIKGGGGSGGGGSGGGGSEVQLLESGGGLVQPGGSLRLSCAASGETESSYVMIWVRQAPGKGLEWVSSISGDSVTTYYADSVKGRFTISRDNSKNTLYLOMNSLRAEDTAVYYCAKGPPTYHTNYYYMDVWGKGTTVTVSS

SEQ ID NO: 333 - protein, 416 aa, synthetic construct
MAQKRPACTLKPECVQQLLVCSQEAKKSAYCPYSHFPVGAALLTQEGRIFKGCNIENACYPLGICAERTAIQKAVSEGYKDFRAIAIASDMQDDFISPCGACRQVMREFGTNWPVYMTKPDGTYIVMTVQELLPSSFGPEDLQKTQGGGGSDIQMTQSPSSLSASVGDRVTITCRASQSISSYLNWYQQKPGKAPKLLIYAASSLQSGVPSRFSGSGSGTDFTLTISSLQPEDFATYYCQQSYIAPYTFGGGTKVEIKGGGGSGGGGSGGGGSEVQLVESGGGLVQPGGSLRLSCAASGETFSDHYMDWVRQAPGKGLASGETFSDHYMDWVRQAPGKGLEWVGRIRNKASSYTTEYAASVKGRFTISRDDSKNSLYLQMNSLKTEDTAVYYCAREPKYWIDFDLWGRGTLVTVSS

SEQ ID NO: 334 - protein, 393 aa, synthetic construct
MAQKRPACTLKPECVQQLLVCSQEAKKSAYCPYSHFPVGAALLTQEGRIFKGCNIENACYPLGICAERTAIQKAVSEGYKDFRAIAIASDMQDDFISPCGACRQVMREFGTNWPVYMTKPDGTYIVMTVQELLPSSFGPEDLQKTQGGGGSDIQMTQSPSSLSASVGDRVTITCRASQSISSYLNWYQQKPGKAPKLLIYAASSLQSGVPSRFSGSGSGTDFTLTISSLQPEDFATYYCQQSYIAPYTFGGGTKVEIKGGGGSGGGGSGGGGSEVQLVESGGGLVQPGRSLRLSCTASGFTFSDHDMNWVRQAPGKGLEWVGRTRNAAGSYTTEYAASVKGRFTISRDDSKNSLYLQMNSLKTEDTAVYYCAREPKYWIDFDLWGRGTLVTSS

SEQ ID NO: 335 - protein, 393 aa, synthetic construct
MAQKRPACTLKPECVQQLLVCSQEAKKSAYCPYSHFPVGAALLTQEGRIFKGCNIENACYPLGICAERTAIQKAVSEGYKDFRAIAIASDMQDDFISPCGACRQVMREFGTNWPVYMTKPDGTYIVMTVQELLPSSFGPEDLQKTQGGGGSEVQLVESGGGLVQPGGSLRLSCAASGETFVDHDMDWVRQAPGKGLEWVGRTRNKLGSYTTEYAASVKGRETGRDDSKNSLYLQMNSLKTEDTAVYYCAREPKYWIDFDLWGRGTLVTVSSGGGGSGGGGSGGGGSDIQMTQSPSSLSASVGDRVTITCRASQSISSYLNWYQQKPGKAPKLLIYAASSLQSGVPSRFSGSGSGTDFTLTISSLQPEDFATYYCQQSYIAPYIFGGGTKVEIK

SEQ ID NO: 336 - protein, 407 aa, synthetic construct
MAQKRPACTLKPECVQQLLVCSQEAKKSAYCPYSHFPVGAALLTQEGRIFKGCNIENACYPLGICAERTAIQKAVSEGYKDFRAIAIASDMQDDFISPCGACRQVMREFGTNWPVYMTKPDGTYIVMTVQELLPSSFGPEDLQKTQGGGGSGGGGSGGGGSDIQMTQSPSSVSASVGDRVTITCRASQGISSWLAWYQQKPGKAPKLLLIYAASSLQSGVPSRFSGSGSGTDFTLTISSLQPEDFATYYCQQTNSFPYTFGGGTKVEIKGGGGSGGGGSGGGGSEVQLLESGGGLVQPGGSLRLSCAASGETFSNYAMSWVRQAPGKGLEWVSAISGSGGSTYYADSVKGRFTISRDNSKNTLYLQMNSLRAEDTAVYYCAKGPPTYHTNYYYMDVWGKGTTVTVSS

SEQ ID NO: 337 - protein, 407 aa, synthetic construct
MAQKRPACTLKPECVQQLLVCSQEAKKSAYCPYSHFPVGAALLTQEGRIFKGCNIENACYPLGICAERTAIQKAVSEGYKDFRAIAIASDMQDDFISPCGACRQVMREFGTNWPVYMTKPDGTYIVMTVQELLPSSFGPEDLQKTQGGGGSGGGGSGGGGSDIQMTQSPSSVSASVGDRVTITCRASQGISSWLAWYQQKPGKAPKLLIYAASSLOQSGVPSRFSGSGSGTDFTLTISSLQPEDFATYYCQQTNSEPYTFGGGTKVEIKGGGGSGGGGSGGGGSEVQLLESGGGLVQPGGSLRLSCAASGETESSYVMIWVRQAPGKGLEWVSSISGDSVTTYYADSVKGRFTISRDNSKNTLYLOMNSLRAEDTAVYYCAKGPPTYHTNYYYMDVWGKGTTVTVSS

SEQ ID NO: 338 - protein, 426 aa, synthetic construct
MAQKRPACTLKPECVQQLLVCSQEAKKSAYCPYSHFPVGAALLTQEGRIFKGCNIENACYPLGICAERTAIQKAVSEGYKDFRAIAIASDMQDDFISPCGACRQVMREFGTNWPVYMTKPDGTYIVMTVQELLPSSFGPEDLQKTQGGGGSGGGGSGGGGSDIQMTQSPSSLSASVGDRVTITCRASQSISSYLNWYQQKPGKAPKLLIYAASSLQSGVPSRFSGSGSGTDFTLTISSLQPEDFATYYCQQSYIAPYTFGGGTKVEIKGGGGSGGGGSGGGGSEVQLVESGGGLVQPGGSLRLSCAASGETFSDHYMDWVRQAPGKGLASGETFSDHYMDWVRQAPGKGLEWVGRIRNKASSYTTEYAASVKGRFTISRDDSKNSLYLQMNSLKTEDTAVYYCAREPKYWIDFDLWGRGTLVTVSS

SEQ ID NO: 339 - protein, 403 aa, synthetic construct
MAQKRPACTLKPECVQQLLVCSQEAKKSAYCPYSHFPVGAALLTQEGRIFKGCNIENACYPLGICAERTAIQKAVSEGYKDFRAIAIASDMQDDFISPCGACRQVMREFGTNWPVYMTKPDGTYIVMTVQELLPSSFGPEDLQKTQGGGGSGGGGSGGGGSDIQMTQSPSSLSASVGDRVTITCRASQSISSYLNWYQQKPGKAPKLLIYAASSLQSGVPSRFSGSGSGTDFTLTISSLQPEDFATYYCQQSYIAPYTFGGGTKVEIKGGGGSGGGGSGGGGSEVQLVESGGGLVQPGRSLRLSCTASGFTFSDHDMNWVRQAPGKGLEWVGRTRNAAGSYTTEYAASVKGRFTISRDDSKNSLYLQMNSLKTEDTAVYYCAREPKYWIDFDLWGRGTLVTSS

SEQ ID NO: 340 - protein, 403 aa, synthetic construct
MAQKRPACTLKPECVQQLLVCSQEAKKSAYCPYSHFPVGAALLTQEGRIFKGCNIENACYPLGICAERTAIQKAVSEGYKDFRAIAIASDMQDDFISPCGACRQVMREFGTNWPVYMTKPDGTYIVMTVQELLPSSFGPEDLQKTQGGGGSGGGGSGGGGSEVQLVESGGGLVQPGGSLRLSCAASGETFVDHDMDWVRQAPGKGLEWVGRTRNKLGSYTTEYAASVKGRETGRDDSKNSLYLQMNSLKTEDTAVYYCAREPKYWIDFDLWGRGTLVTVSSGGGGSGGGGSGGGGSDIQMTQSPSSLSASVGDRVTITCRASQSISSYLNWYQQKPGKAPKLLIYAASSLQSGVPSRFSGSGSGTDFTLTISSLQPEDFATYYCQQSYIAPYIFGGGTKVEIK

SEQ ID NO: 341 - protein, 412 aa, synthetic construct
MAQKRPACTLKPECVQQLLVCSQEAKKSAYCPYSHFPVGAALLTQEGRIFKGCNIENACYPLGICAERTAIQKAVSEGYKDFRAIAIASDMQDDFISPCGACRQVMREFGTNWPVYMTKPDGTYIVMTVQELLPSSFGPEDLQKTQGGGGSGGGGSGGGGSGGGGSDIQMTQSPSSVSASVGDRVTITCRASQGISSWLAWYQQKPGKAPKLLLIYAASSLQSGVPSRFSGSGSGTDFTLTISSLQPEDFATYYCQQTNSFPYTFGGGTKVEIKGGGGSGGGGSGGGGSEVQLLESGGGLVQPGGSLRLSCAASGETFSNYAMSWVRQAPGKGLEWVSAISGSGGSTYYADSVKGRFTISRDNSKNTLYLQMNSLRAEDTAVYYCAKGPPTYHTNYYYMDVWGKGTTVTVSS

SEQ ID NO: 342 - protein, 412 aa, synthetic construct
MAQKRPACTLKPECVQQLLVCSQEAKKSAYCPYSHFPVGAALLTQEGRIFKGCNIENACYPLGICAERTAIQKAVSEGYKDFRAIAIASDMQDDFISPCGACRQVMREFGTNWPVYMTKPDGTYIVMTVQELLPSSFGPEDLQKTQGGGGSGGGGSGGGGSGGGGSDIQMTQSPSSVSASVGDRVTITCRASQGISSWLAWYQQKPGKAPKLLIYAASSLOQSGVPSRFSGSGSGTDFTLTISSLQPEDFATYYCQQTNSEPYTFGGGTKVEIKGGGGSGGGGSGGGGSEVQLLESGGGLVQPGGSLRLSCAASGETESSYVMIWVRQAPGKGLEWVSSISGDSVTTYYADSVKGRFTISRDNSKNTLYLOMNSLRAEDTAVYYCAKGPPTYHTNYYYMDVWGKGTTVTVSS

SEQ ID NO: 343 - protein, 431 aa, synthetic construct
MAQKRPACTLKPECVQQLLVCSQEAKKSAYCPYSHFPVGAALLTQEGRIFKGCNIENACYPLGICAERTAIQKAVSEGYKDFRAIAIASDMQDDFISPCGACRQVMREFGTNWPVYMTKPDGTYIVMTVQELLPSSFGPEDLQKTQGGGGSGGGGSGGGGSGGGGSDIQMTQSPSSLSASVGDRVTITCRASQSISSYLNWYQQKPGKAPKLLIYAASSLQSGVPSRFSGSGSGTDFTLTISSLQPEDFATYYCQQSYIAPYTFGGGTKVEIKGGGGSGGGGSGGGGSEVQLVESGGGLVQPGGSLRLSCAASGETFSDHYMDWVRQAPGKGLASGETFSDHYMDWVRQAPGKGLEWVGRIRNKASSYTTEYAASVKGRFTISRDDSKNSLYLQMNSLKTEDTAVYYCAREPKYWIDFDLWGRGTLVTVSS

SEQ ID NO: 344 - protein, 408 aa, synthetic construct
MAQKRPACTLKPECVQQLLVCSQEAKKSAYCPYSHFPVGAALLTQEGRIFKGCNIENACYPLGICAERTAIQKAVSEGYKDFRAIAIASDMQDDFISPCGACRQVMREFGTNWPVYMTKPDGTYIVMTVQELLPSSFGPEDLQKTQGGGGSGGGGSGGGGSGGGGSDIQMTQSPSSLSASVGDRVTITCRASQSISSYLNWYQQKPGKAPKLLIYAASSLQSGVPSRFSGSGSGTDFTLTISSLQPEDFATYYCQQSYIAPYTFGGGTKVEIKGGGGSGGGGSGGGGSEVQLVESGGGLVQPGRSLRLSCTASGFTFSDHDMNWVRQAPGKGLEWVGRTRNAAGSYTTEYAASVKGRFTISRDDSKNSLYLQMNSLKTEDTAVYYCAREPKYWIDFDLWGRGTLVTSS

SEQ ID NO: 345 - protein, 408 aa, synthetic construct
MAQKRPACTLKPECVQQLLVCSQEAKKSAYCPYSHFPVGAALLTQEGRIFKGCNIENACYPLGICAERTAIQKAVSEGYKDFRAIAIASDMQDDFISPCGACRQVMREFGTNWPVYMTKPDGTYIVMTVQELLPSSFGPEDLQKTQGGGGSGGGGSGGGGSGGGGSEVQLVESGGGLVQPGGSLRLSCAASGETFVDHDMDWVRQAPGKGLEWVGRTRNKLGSYTTEYAASVKGRETGRDDSKNSLYLQMNSLKTEDTAVYYCAREPKYWIDFDLWGRGTLVTVSSGGGGSGGGGSGGGGSDIQMTQSPSSLSASVGDRVTITCRASQSISSYLNWYQQKPGKAPKLLIYAASSLQSGVPSRFSGSGSGTDFTLTISSLQPEDFATYYCQQSYIAPYIFGGGTKVEIK

SEQ ID NO: 346 - protein, 417 aa, synthetic construct
MAQKRPACTLKPECVQQLLVCSQEAKKSAYCPYSHFPVGAALLTQEGRIFKGCNIENACYPLGICAERTAIQKAVSEGYKDFRAIAIASDMQDDFISPCGACRQVMREFGTNWPVYMTKPDGTYIVMTVQELLPSSFGPEDLQKTQGGGGSGGGGSGGGGSGGGGSGGGGSDIQMTQSPSSVSASVGDRVTITCRASQGISSWLAWYQQKPGKAPKLLLIYAASSLQSGVPSRFSGSGSGTDFTLTISSLQPEDFATYYCQQTNSFPYTFGGGTKVEIKGGGGSGGGGSGGGGSEVQLLESGGGLVQPGGSLRLSCAASGETFSNYAMSWVRQAPGKGLEWVSAISGSGGSTYYADSVKGRFTISRDNSKNTLYLQMNSLRAEDTAVYYCAKGPPTYHTNYYYMDVWGKGTTVTVSS

SEQ ID NO: 347 - protein, 417 aa, synthetic construct
MAQKRPACTLKPECVQQLLVCSQEAKKSAYCPYSHFPVGAALLTQEGRIFKGCNIENACYPLGICAERTAIQKAVSEGYKDFRAIAIASDMQDDFISPCGACRQVMREFGTNWPVYMTKPDGTYIVMTVQELLPSSFGPEDLQKTQGGGGSGGGGSGGGGSGGGGSGGGGSDIQMTQSPSSVSASVGDRVTITCRASQGISSWLAWYQQKPGKAPKLLIYAASSLOQSGVPSRFSGSGSGTDFTLTISSLQPEDFATYYCQQTNSEPYTFGGGTKVEIKGGGGSGGGGSGGGGSEVQLLESGGGLVQPGGSLRLSCAASGETESSYVMIWVRQAPGKGLEWVSSISGDSVTTYYADSVKGRFTISRDNSKNTLYLOMNSLRAEDTAVYYCAKGPPTYHTNYYYMDVWGKGTTVTVSS

SEQ ID NO: 348 - protein, 436 aa, synthetic construct
MAQKRPACTLKPECVQQLLVCSQEAKKSAYCPYSHFPVGAALLTQEGRIFKGCNIENACYPLGICAERTAIQKAVSEGYKDFRAIAIASDMQDDFISPCGACRQVMREFGTNWPVYMTKPDGTYIVMTVQELLPSSFGPEDLQKTQGGGGSGGGGSGGGGSGGGGSGGGGSDIQMTQSPSSLSASVGDRVTITCRASQSISSYLNWYQQKPGKAPKLLIYAASSLQSGVPSRFSGSGSGTDFTLTISSLQPEDFATYYCQQSYIAPYTFGGGTKVEIKGGGGSGGGGSGGGGSEVQLVESGGGLVQPGGSLRLSCAASGETFSDHYMDWVRQAPGKGLASGETFSDHYMDWVRQAPGKGLEWVGRIRNKASSYTTEYAASVKGRFTISRDDSKNSLYLQMNSLKTEDTAVYYCAREPKYWIDFDLWGRGTLVTVSS

SEQ ID NO: 349 - protein, 413 aa, synthetic construct
MAQKRPACTLKPECVQQLLVCSQEAKKSAYCPYSHFPVGAALLTQEGRIFKGCNIENACYPLGICAERTAIQKAVSEGYKDFRAIAIASDMQDDFISPCGACRQVMREFGTNWPVYMTKPDGTYIVMTVQELLPSSFGPEDLQKTQGGGGSGGGGSGGGGSGGGGSGGGGSDIQMTQSPSSLSASVGDRVTITCRASQSISSYLNWYQQKPGKAPKLLIYAASSLQSGVPSRFSGSGSGTDFTLTISSLQPEDFATYYCQQSYIAPYTFGGGTKVEIKGGGGSGGGGSGGGGSEVQLVESGGGLVQPGRSLRLSCTASGFTFSDHDMNWVRQAPGKGLEWVGRTRNAAGSYTTEYAASVKGRFTISRDDSKNSLYLQMNSLKTEDTAVYYCAREPKYWIDFDLWGRGTLVTSS

SEQ ID NO: 350 - protein, 413 aa, synthetic construct
MAQKRPACTLKPECVQQLLVCSQEAKKSAYCPYSHFPVGAALLTQEGRIFKGCNIENACYPLGICAERTAIQKAVSEGYKDFRAIAIASDMQDDFISPCGACRQVMREFGTNWPVYMTKPDGTYIVMTVQELLPSSFGPEDLQKTQGGGGSGGGGSGGGGSGGGGSGGGGSEVQLVESGGGLVQPGGSLRLSCAASGETFVDHDMDWVRQAPGKGLEWVGRTRNKLGSYTTEYAASVKGRETGRDDSKNSLYLQMNSLKTEDTAVYYCAREPKYWIDFDLWGRGTLVTVSSGGGGSGGGGSGGGGSDIQMTQSPSSLSASVGDRVTITCRASQSISSYLNWYQQKPGKAPKLLIYAASSLQSGVPSRFSGSGSGTDFTLTISSLQPEDFATYYCQQSYIAPYIFGGGTKVEIK

SEQ ID NO: 351 - protein, 422 aa, synthetic construct
MAQKRPACTLKPECVQQLLVCSQEAKKSAYCPYSHFPVGAALLTQEGRIFKGCNIENACYPLGICAERTAIQKAVSEGYKDFRAIAIASDMQDDFISPCGACRQVMREFGTNWPVYMTKPDGTYIVMTVQELLPSSFGPEDLQKTQGGGGSGGGGSGGGGSGGGGSGGGGSGGGGSDIQMTQSPSSVSASVGDRVTITCRASQGISSWLAWYQQKPGKAPKLLLIYAASSLQSGVPSRFSGSGSGTDFTLTISSLQPEDFATYYCQQTNSFPYTFGGGTKVEIKGGGGSGGGGSGGGGSEVQLLESGGGLVQPGGSLRLSCAASGETFSNYAMSWVRQAPGKGLEWVSAISGSGGSTYYADSVKGRFTISRDNSKNTLYLQMNSLRAEDTAVYYCAKGPPTYHTNYYYMDVWGKGTTVTVSS

SEQ ID NO: 352 - protein, 422 aa, synthetic construct
MAQKRPACTLKPECVQQLLVCSQEAKKSAYCPYSHFPVGAALLTQEGRIFKGCNIENACYPLGICAERTAIQKAVSEGYKDFRAIAIASDMQDDFISPCGACRQVMREFGTNWPVYMTKPDGTYIVMTVQELLPSSFGPEDLQKTQGGGGSGGGGSGGGGSGGGGSGGGGSGGGGSDIQMTQSPSSVSASVGDRVTITCRASQGISSWLAWYQQKPGKAPKLLIYAASSLOQSGVPSRFSGSGSGTDFTLTISSLQPEDFATYYCQQTNSEPYTFGGGTKVEIKGGGGSGGGGSGGGGSEVQLLESGGGLVQPGGSLRLSCAASGETESSYVMIWVRQAPGKGLEWVSSISGDSVTTYYADSVKGRFTISRDNSKNTLYLOMNSLRAEDTAVYYCAKGPPTYHTNYYYMDVWGKGTTVTVSS

SEQ ID NO: 353 - protein, 441 aa, synthetic construct
MAQKRPACTLKPECVQQLLVCSQEAKKSAYCPYSHFPVGAALLTQEGRIFKGCNIENACYPLGICAERTAIQKAVSEGYKDFRAIAIASDMQDDFISPCGACRQVMREFGTNWPVYMTKPDGTYIVMTVQELLPSSFGPEDLQKTQGGGGSGGGGSGGGGSGGGGSGGGGSGGGGSDIQMTQSPSSLSASVGDRVTITCRASQSISSYLNWYQQKPGKAPKLLIYAASSLQSGVPSRFSGSGSGTDFTLTISSLQPEDFATYYCQQSYIAPYTFGGGTKVEIKGGGGSGGGGSGGGGSEVQLVESGGGLVQPGGSLRLSCAASGETFSDHYMDWVRQAPGKGLASGETFSDHYMDWVRQAPGKGLEWVGRIRNKASSYTTEYAASVKGRFTISRDDSKNSLYLQMNSLKTEDTAVYYCAREPKYWIDFDLWGRGTLVTVSS

SEQ ID NO: 354 - protein, 418 aa, synthetic construct
MAQKRPACTLKPECVQQLLVCSQEAKKSAYCPYSHFPVGAALLTQEGRIFKGCNIENACYPLGICAERTAIQKAVSEGYKDFRAIAIASDMQDDFISPCGACRQVMREFGTNWPVYMTKPDGTYIVMTVQELLPSSFGPEDLQKTQGGGGSGGGGSGGGGSGGGGSGGGGSGGGGSDIQMTQSPSSLSASVGDRVTITCRASQSISSYLNWYQQKPGKAPKLLIYAASSLQSGVPSRFSGSGSGTDFTLTISSLQPEDFATYYCQQSYIAPYTFGGGTKVEIKGGGGSGGGGSGGGGSEVQLVESGGGLVQPGRSLRLSCTASGFTFSDHDMNWVRQAPGKGLEWVGRTRNAAGSYTTEYAASVKGRFTISRDDSKNSLYLQMNSLKTEDTAVYYCAREPKYWIDFDLWGRGTLVTSS

SEQ ID NO: 355 - protein, 418 aa, synthetic construct
MAQKRPACTLKPECVQQLLVCSQEAKKSAYCPYSHFPVGAALLTQEGRIFKGCNIENACYPLGICAERTAIQKAVSEGYKDFRAIAIASDMQDDFISPCGACRQVMREFGTNWPVYMTKPDGTYIVMTVQELLPSSFGPEDLQKTQGGGGSGGGGSGGGGSGGGGSGGGGSGGGGSEVQLVESGGGLVQPGGSLRLSCAASGETFVDHDMDWVRQAPGKGLEWVGRTRNKLGSYTTEYAASVKGRETGRDDSKNSLYLQMNSLKTEDTAVYYCAREPKYWIDFDLWGRGTLVTVSSGGGGSGGGGSGGGGSDIQMTQSPSSLSASVGDRVTITCRASQSISSYLNWYQQKPGKAPKLLIYAASSLQSGVPSRFSGSGSGTDFTLTISSLQPEDFATYYCQQSYIAPYIFGGGTKVEIK

SEQ ID NO: 356 - protein, 427 aa, synthetic construct
MAQKRPACTLKPECVQQLLVCSQEAKKSAYCPYSHFPVGAALLTQEGRIFKGCNIENACYPLGICAERTAIQKAVSEGYKDFRAIAIASDMQDDFISPCGACRQVMREFGTNWPVYMTKPDGTYIVMTVQELLPSSFGPEDLQKTQGGGGSGGGGSGGGGSGGGGSGGGGSGGGGSGGGGSDIQMTQSPSSVSASVGDRVTITCRASQGISSWLAWYQQKPGKAPKLLLIYAASSLQSGVPSRFSGSGSGTDFTLTISSLQPEDFATYYCQQTNSFPYTFGGGTKVEIKGGGGSGGGGSGGGGSEVQLLESGGGLVQPGGSLRLSCAASGETFSNYAMSWVRQAPGKGLEWVSAISGSGGSTYYADSVKGRFTISRDNSKNTLYLQMNSLRAEDTAVYYCAKGPPTYHTNYYYMDVWGKGTTVTVSS

SEQ ID NO: 357 - protein, 427 aa, synthetic construct
MAQKRPACTLKPECVQQLLVCSQEAKKSAYCPYSHFPVGAALLTQEGRIFKGCNIENACYPLGICAERTAIQKAVSEGYKDFRAIAIASDMQDDFISPCGACRQVMREFGTNWPVYMTKPDGTYIVMTVQELLPSSFGPEDLQKTQGGGGSGGGGSGGGGSGGGGSGGGGSGGGGSGGGGSDIQMTQSPSSVSASVGDRVTITCRASQGISSWLAWYQQKPGKAPKLLIYAASSLOQSGVPSRFSGSGSGTDFTLTISSLQPEDFATYYCQQTNSEPYTFGGGTKVEIKGGGGSGGGGSGGGGSEVQLLESGGGLVQPGGSLRLSCAASGETESSYVMIWVRQAPGKGLEWVSSISGDSVTTYYADSVKGRFTISRDNSKNTLYLOMNSLRAEDTAVYYCAKGPPTYHTNYYYMDVWGKGTTVTVSS

SEQ ID NO: 358 - protein, 446 aa, synthetic construct
MAQKRPACTLKPECVQQLLVCSQEAKKSAYCPYSHFPVGAALLTQEGRIFKGCNIENACYPLGICAERTAIQKAVSEGYKDFRAIAIASDMQDDFISPCGACRQVMREFGTNWPVYMTKPDGTYIVMTVQELLPSSFGPEDLQKTQGGGGSGGGGSGGGGSGGGGSGGGGSGGGGSGGGGSDIQMTQSPSSLSASVGDRVTITCRASQSISSYLNWYQQKPGKAPKLLIYAASSLQSGVPSRFSGSGSGTDFTLTISSLQPEDFATYYCQQSYIAPYTFGGGTKVEIKGGGGSGGGGSGGGGSEVQLVESGGGLVQPGGSLRLSCAASGETFSDHYMDWVRQAPGKGLASGETFSDHYMDWVRQAPGKGLEWVGRIRNKASSYTTEYAASVKGRFTISRDDSKNSLYLQMNSLKTEDTAVYYCAREPKYWIDFDLWGRGTLVTVSS

SEQ ID NO: 359 - protein, 423 aa, synthetic construct
MAQKRPACTLKPECVQQLLVCSQEAKKSAYCPYSHFPVGAALLTQEGRIFKGCNIENACYPLGICAERTAIQKAVSEGYKDFRAIAIASDMQDDFISPCGACRQVMREFGTNWPVYMTKPDGTYIVMTVQELLPSSFGPEDLQKTQGGGGSGGGGSGGGGSGGGGSGGGGSGGGGSGGGGSDIQMTQSPSSLSASVGDRVTITCRASQSISSYLNWYQQKPGKAPKLLIYAASSLQSGVPSRFSGSGSGTDFTLTISSLQPEDFATYYCQQSYIAPYTFGGGTKVEIKGGGGSGGGGSGGGGSEVQLVESGGGLVQPGRSLRLSCTASGFTFSDHDMNWVRQAPGKGLEWVGRTRNAAGSYTTEYAASVKGRFTISRDDSKNSLYLQMNSLKTEDTAVYYCAREPKYWIDFDLWGRGTLVTSS

SEQ ID NO: 360 - protein, 423 aa, synthetic construct
MAQKRPACTLKPECVQQLLVCSQEAKKSAYCPYSHFPVGAALLTQEGRIFKGCNIENACYPLGICAERTAIQKAVSEGYKDFRAIAIASDMQDDFISPCGACRQVMREFGTNWPVYMTKPDGTYIVMTVQELLPSSFGPEDLQKTQGGGGSGGGGSGGGGSGGGGSGGGGSGGGGSGGGGSEVQLVESGGGLVQPGGSLRLSCAASGETFVDHDMDWVRQAPGKGLEWVGRTRNKLGSYTTEYAASVKGRETGRDDSKNSLYLQMNSLKTEDTAVYYCAREPKYWIDFDLWGRGTLVTVSSGGGGSGGGGSGGGGSDIQMTQSPSSLSASVGDRVTITCRASQSISSYLNWYQQKPGKAPKLLIYAASSLQSGVPSRFSGSGSGTDFTLTISSLQPEDFATYYCQQSYIAPYIFGGGTKVEIK

SEQ ID NO: 361 - protein, 432 aa, synthetic construct
MAQKRPACTLKPECVQQLLVCSQEAKKSAYCPYSHFPVGAALLTQEGRIFKGCNIENACYPLGICAERTAIQKAVSEGYKDFRAIAIASDMQDDFISPCGACRQVMREFGTNWPVYMTKPDGTYIVMTVQELLPSSFGPEDLQKTQGGGGSGGGGSGGGGSGGGGSGGGGSGGGGSGGGGSGGGGSDIQMTQSPSSVSASVGDRVTITCRASQGISSWLAWYQQKPGKAPKLLLIYAASSLQSGVPSRFSGSGSGTDFTLTISSLQPEDFATYYCQQTNSFPYTFGGGTKVEIKGGGGSGGGGSGGGGSEVQLLESGGGLVQPGGSLRLSCAASGETFSNYAMSWVRQAPGKGLEWVSAISGSGGSTYYADSVKGRFTISRDNSKNTLYLQMNSLRAEDTAVYYCAKGPPTYHTNYYYMDVWGKGTTVTVSS

SEQ ID NO: 362 - protein, 432 aa, synthetic construct
MAQKRPACTLKPECVQQLLVCSQEAKKSAYCPYSHFPVGAALLTQEGRIFKGCNIENACYPLGICAERTAIQKAVSEGYKDFRAIAIASDMQDDFISPCGACRQVMREFGTNWPVYMTKPDGTYIVMTVQELLPSSFGPEDLQKTQGGGGSGGGGSGGGGSGGGGSGGGGSGGGGSGGGGSGGGGSDIQMTQSPSSVSASVGDRVTITCRASQGISSWLAWYQQKPGKAPKLLIYAASSLOQSGVPSRFSGSGSGTDFTLTISSLQPEDFATYYCQQTNSEPYTFGGGTKVEIKGGGGSGGGGSGGGGSEVQLLESGGGLVQPGGSLRLSCAASGETESSYVMIWVRQAPGKGLEWVSSISGDSVTTYYADSVKGRFTISRDNSKNTLYLOMNSLRAEDTAVYYCAKGPPTYHTNYYYMDVWGKGTTVTVSS

SEQ ID NO: 363 - protein, 451 aa, synthetic construct
MAQKRPACTLKPECVQQLLVCSQEAKKSAYCPYSHFPVGAALLTQEGRIFKGCNIENACYPLGICAERTAIQKAVSEGYKDFRAIAIASDMQDDFISPCGACRQVMREFGTNWPVYMTKPDGTYIVMTVQELLPSSFGPEDLQKTQGGGGSGGGGSGGGGSGGGGSGGGGSGGGGSGGGGSGGGGSDIQMTQSPSSLSASVGDRVTITCRASQSISSYLNWYQQKPGKAPKLLIYAASSLQSGVPSRFSGSGSGTDFTLTISSLQPEDFATYYCQQSYIAPYTFGGGTKVEIKGGGGSGGGGSGGGGSEVQLVESGGGLVQPGGSLRLSCAASGETFSDHYMDWVRQAPGKGLASGETFSDHYMDWVRQAPGKGLEWVGRIRNKASSYTTEYAASVKGRFTISRDDSKNSLYLQMNSLKTEDTAVYYCAREPKYWIDFDLWGRGTLVTVSS

SEQ ID NO: 364 - protein, 428 aa, synthetic construct
MAQKRPACTLKPECVQQLLVCSQEAKKSAYCPYSHFPVGAALLTQEGRIFKGCNIENACYPLGICAERTAIQKAVSEGYKDFRAIAIASDMQDDFISPCGACRQVMREFGTNWPVYMTKPDGTYIVMTVQELLPSSFGPEDLQKTQGGGGSGGGGSGGGGSGGGGSGGGGSGGGGSGGGGSGGGGSDIQMTQSPSSLSASVGDRVTITCRASQSISSYLNWYQQKPGKAPKLLIYAASSLQSGVPSRFSGSGSGTDFTLTISSLQPEDFATYYCQQSYIAPYTFGGGTKVEIKGGGGSGGGGSGGGGSEVQLVESGGGLVQPGRSLRLSCTASGFTFSDHDMNWVRQAPGKGLEWVGRTRNAAGSYTTEYAASVKGRFTISRDDSKNSLYLQMNSLKTEDTAVYYCAREPKYWIDFDLWGRGTLVTSS

SEQ ID NO: 365 - protein, 428 aa, synthetic construct
MAQKRPACTLKPECVQQLLVCSQEAKKSAYCPYSHFPVGAALLTQEGRIFKGCNIENACYPLGICAERTAIQKAVSEGYKDFRAIAIASDMQDDFISPCGACRQVMREFGTNWPVYMTKPDGTYIVMTVQELLPSSFGPEDLQKTQGGGGSGGGGSGGGGSGGGGSGGGGSGGGGSGGGGSGGGGSEVQLVESGGGLVQPGGSLRLSCAASGETFVDHDMDWVRQAPGKGLEWVGRTRNKLGSYTTEYAASVKGRETGRDDSKNSLYLQMNSLKTEDTAVYYCAREPKYWIDFDLWGRGTLVTVSSGGGGSGGGGSGGGGSDIQMTQSPSSLSASVGDRVTITCRASQSISSYLNWYQQKPGKAPKLLIYAASSLQSGVPSRFSGSGSGTDFTLTISSLQPEDFATYYCQQSYIAPYIFGGGTKVEIK

SEQ ID NO: 366 - protein, 437 aa, synthetic construct
MAQKRPACTLKPECVQQLLVCSQEAKKSAYCPYSHFPVGAALLTQEGRIFKGCNIENACYPLGICAERTAIQKAVSEGYKDFRAIAIASDMQDDFISPCGACRQVMREFGTNWPVYMTKPDGTYIVMTVQELLPSSFGPEDLQKTQGGGGSGGGGSGGGGSGGGGSGGGGSGGGGSGGGGSGGGGSGGGGSDIQMTQSPSSVSASVGDRVTITCRASQGISSWLAWYQQKPGKAPKLLLIYAASSLQSGVPSRFSGSGSGTDFTLTISSLQPEDFATYYCQQTNSFPYTFGGGTKVEIKGGGGSGGGGSGGGGSEVQLLESGGGLVQPGGSLRLSCAASGETFSNYAMSWVRQAPGKGLEWVSAISGSGGSTYYADSVKGRFTISRDNSKNTLYLQMNSLRAEDTAVYYCAKGPPTYHTNYYYMDVWGKGTTVTVSS

SEQ ID NO: 367 - protein, 437 aa, synthetic construct
MAQKRPACTLKPECVQQLLVCSQEAKKSAYCPYSHFPVGAALLTQEGRIFKGCNIENACYPLGICAERTAIQKAVSEGYKDFRAIAIASDMQDDFISPCGACRQVMREFGTNWPVYMTKPDGTYIVMTVQELLPSSFGPEDLQKTQGGGGSGGGGSGGGGSGGGGSGGGGSGGGGSGGGGSGGGGSGGGGSDIQMTQSPSSVSASVGDRVTITCRASQGISSWLAWYQQKPGKAPKLLIYAASSLOQSGVPSRFSGSGSGTDFTLTISSLQPEDFATYYCQQTNSEPYTFGGGTKVEIKGGGGSGGGGSGGGGSEVQLLESGGGLVQPGGSLRLSCAASGETESSYVMIWVRQAPGKGLEWVSSISGDSVTTYYADSVKGRFTISRDNSKNTLYLOMNSLRAEDTAVYYCAKGPPTYHTNYYYMDVWGKGTTVTVSS

SEQ ID NO: 368 - protein, 456 aa, synthetic construct
MAQKRPACTLKPECVQQLLVCSQEAKKSAYCPYSHFPVGAALLTQEGRIFKGCNIENACYPLGICAERTAIQKAVSEGYKDFRAIAIASDMQDDFISPCGACRQVMREFGTNWPVYMTKPDGTYIVMTVQELLPSSFGPEDLQKTQGGGGSGGGGSGGGGSGGGGSGGGGSGGGGSGGGGSGGGGSGGGGSDIQMTQSPSSLSASVGDRVTITCRASQSISSYLNWYQQKPGKAPKLLIYAASSLQSGVPSRFSGSGSGTDFTLTISSLQPEDFATYYCQQSYIAPYTFGGGTKVEIKGGGGSGGGGSGGGGSEVQLVESGGGLVQPGGSLRLSCAASGETFSDHYMDWVRQAPGKGLASGETFSDHYMDWVRQAPGKGLEWVGRIRNKASSYTTEYAASVKGRFTISRDDSKNSLYLQMNSLKTEDTAVYYCAREPKYWIDFDLWGRGTLVTVSS

SEQ ID NO: 369 - protein, 433 aa, synthetic construct
MAQKRPACTLKPECVQQLLVCSQEAKKSAYCPYSHFPVGAALLTQEGRIFKGCNIENACYPLGICAERTAIQKAVSEGYKDFRAIAIASDMQDDFISPCGACRQVMREFGTNWPVYMTKPDGTYIVMTVQELLPSSFGPEDLQKTQGGGGSGGGGSGGGGSGGGGSGGGGSGGGGSGGGGSGGGGSGGGGSDIQMTQSPSSLSASVGDRVTITCRASQSISSYLNWYQQKPGKAPKLLIYAASSLQSGVPSRFSGSGSGTDFTLTISSLQPEDFATYYCQQSYIAPYTFGGGTKVEIKGGGGSGGGGSGGGGSEVQLVESGGGLVQPGRSLRLSCTASGFTFSDHDMNWVRQAPGKGLEWVGRTRNAAGSYTTEYAASVKGRFTISRDDSKNSLYLQMNSLKTEDTAVYYCAREPKYWIDFDLWGRGTLVTSS

SEQ ID NO: 370 - protein, 433 aa, synthetic construct
MAQKRPACTLKPECVQQLLVCSQEAKKSAYCPYSHFPVGAALLTQEGRIFKGCNIENACYPLGICAERTAIQKAVSEGYKDFRAIAIASDMQDDFISPCGACRQVMREFGTNWPVYMTKPDGTYIVMTVQELLPSSFGPEDLQKTQGGGGSGGGGSGGGGSGGGGSGGGGSGGGGSGGGGSGGGGSGGGGSEVQLVESGGGLVQPGGSLRLSCAASGETFVDHDMDWVRQAPGKGLEWVGRTRNKLGSYTTEYAASVKGRETGRDDSKNSLYLQMNSLKTEDTAVYYCAREPKYWIDFDLWGRGTLVTVSSGGGGSGGGGSGGGGSDIQMTQSPSSLSASVGDRVTITCRASQSISSYLNWYQQKPGKAPKLLIYAASSLQSGVPSRFSGSGSGTDFTLTISSLQPEDFATYYCQQSYIAPYIFGGGTKVEIK

SEQ ID NO: 371 - protein, 442 aa, synthetic construct
MAQKRPACTLKPECVQQLLVCSQEAKKSAYCPYSHFPVGAALLTQEGRIFKGCNIENACYPLGICAERTAIQKAVSEGYKDFRAIAIASDMQDDFISPCGACRQVMREFGTNWPVYMTKPDGTYIVMTVQELLPSSFGPEDLQKTQGGGGSGGGGSGGGGSGGGGSGGGGSGGGGSGGGGSGGGGSGGGGSGGGGSDIQMTQSPSSVSASVGDRVTITCRASQGISSWLAWYQQKPGKAPKLLLIYAASSLQSGVPSRFSGSGSGTDFTLTISSLQPEDFATYYCQQTNSFPYTFGGGTKVEIKGGGGSGGGGSGGGGSEVQLLESGGGLVQPGGSLRLSCAASGETFSNYAMSWVRQAPGKGLEWVSAISGSGGSTYYADSVKGRFTISRDNSKNTLYLQMNSLRAEDTAVYYCAKGPPTYHTNYYYMDVWGKGTTVTVSS

SEQ ID NO: 372 - protein, 442 aa, synthetic construct
MAQKRPACTLKPECVQQLLVCSQEAKKSAYCPYSHFPVGAALLTQEGRIFKGCNIENACYPLGICAERTAIQKAVSEGYKDFRAIAIASDMQDDFISPCGACRQVMREFGTNWPVYMTKPDGTYIVMTVQELLPSSFGPEDLQKTQGGGGSGGGGSGGGGSGGGGSGGGGSGGGGSGGGGSGGGGSGGGGSGGGGSDIQMTQSPSSVSASVGDRVTITCRASQGISSWLAWYQQKPGKAPKLLIYAASSLOQSGVPSRFSGSGSGTDFTLTISSLQPEDFATYYCQQTNSEPYTFGGGTKVEIKGGGGSGGGGSGGGGSEVQLLESGGGLVQPGGSLRLSCAASGETESSYVMIWVRQAPGKGLEWVSSISGDSVTTYYADSVKGRFTISRDNSKNTLYLOMNSLRAEDTAVYYCAKGPPTYHTNYYYMDVWGKGTTVTVSS

SEQ ID NO: 373 - protein, 461 aa, synthetic construct
MAQKRPACTLKPECVQQLLVCSQEAKKSAYCPYSHFPVGAALLTQEGRIFKGCNIENACYPLGICAERTAIQKAVSEGYKDFRAIAIASDMQDDFISPCGACRQVMREFGTNWPVYMTKPDGTYIVMTVQELLPSSFGPEDLQKTQGGGGSGGGGSGGGGSGGGGSGGGGSGGGGSGGGGSGGGGSGGGGSGGGGSDIQMTQSPSSLSASVGDRVTITCRASQSISSYLNWYQQKPGKAPKLLIYAASSLQSGVPSRFSGSGSGTDFTLTISSLQPEDFATYYCQQSYIAPYTFGGGTKVEIKGGGGSGGGGSGGGGSEVQLVESGGGLVQPGGSLRLSCAASGETFSDHYMDWVRQAPGKGLASGETFSDHYMDWVRQAPGKGLEWVGRIRNKASSYTTEYAASVKGRFTISRDDSKNSLYLQMNSLKTEDTAVYYCAREPKYWIDFDLWGRGTLVTVSS

SEQ ID NO: 374 - protein, 438 aa, synthetic construct
MAQKRPACTLKPECVQQLLVCSQEAKKSAYCPYSHFPVGAALLTQEGRIFKGCNIENACYPLGICAERTAIQKAVSEGYKDFRAIAIASDMQDDFISPCGACRQVMREFGTNWPVYMTKPDGTYIVMTVQELLPSSFGPEDLQKTQGGGGSGGGGSGGGGSGGGGSGGGGSGGGGSGGGGSGGGGSGGGGSGGGGSDIQMTQSPSSLSASVGDRVTITCRASQSISSYLNWYQQKPGKAPKLLIYAASSLQSGVPSRFSGSGSGTDFTLTISSLQPEDFATYYCQQSYIAPYTFGGGTKVEIKGGGGSGGGGSGGGGSEVQLVESGGGLVQPGRSLRLSCTASGFTFSDHDMNWVRQAPGKGLEWVGRTRNAAGSYTTEYAASVKGRFTISRDDSKNSLYLQMNSLKTEDTAVYYCAREPKYWIDFDLWGRGTLVTSS

SEQ ID NO: 375 - protein, 438 aa, synthetic construct
MAQKRPACTLKPECVQQLLVCSQEAKKSAYCPYSHFPVGAALLTQEGRIFKGCNIENACYPLGICAERTAIQKAVSEGYKDFRAIAIASDMQDDFISPCGACRQVMREFGTNWPVYMTKPDGTYIVMTVQELLPSSFGPEDLQKTQGGGGSGGGGSGGGGSGGGGSGGGGSGGGGSGGGGSGGGGSGGGGSGGGGSEVQLVESGGGLVQPGGSLRLSCAASGETFVDHDMDWVRQAPGKGLEWVGRTRNKLGSYTTEYAASVKGRETGRDDSKNSLYLQMNSLKTEDTAVYYCAREPKYWIDFDLWGRGTLVTVSSGGGGSGGGGSGGGGSDIQMTQSPSSLSASVGDRVTITCRASQSISSYLNWYQQKPGKAPKLLIYAASSLQSGVPSRFSGSGSGTDFTLTISSLQPEDFATYYCQQSYIAPYIFGGGTKVEIK

SEQ ID NO: 376 - protein, 447 aa, synthetic construct
MAQKRPACTLKPECVQQLLVCSQEAKKSAYCPYSHFPVGAALLTQEGRIFKGCNIENACYPLGICAERTAIQKAVSEGYKDFRAIAIASDMQDDFISPCGACRQVMREFGTNWPVYMTKPDGTYIVMTVQELLPSSFGPEDLQKTQGGGGSGGGGSGGGGSGGGGSGGGGSGGGGSGGGGSGGGGSGGGGSGGGGSGGGGSDIQMTQSPSSVSASVGDRVTITCRASQGISSWLAWYQQKPGKAPKLLLIYAASSLQSGVPSRFSGSGSGTDFTLTISSLQPEDFATYYCQQTNSFPYTFGGGTKVEIKGGGGSGGGGSGGGGSEVQLLESGGGLVQPGGSLRLSCAASGETFSNYAMSWVRQAPGKGLEWVSAISGSGGSTYYADSVKGRFTISRDNSKNTLYLQMNSLRAEDTAVYYCAKGPPTYHTNYYYMDVWGKGTTVTVSS

SEQ ID NO: 377 - protein, 447 aa, synthetic construct
MAQKRPACTLKPECVQQLLVCSQEAKKSAYCPYSHFPVGAALLTQEGRIFKGCNIENACYPLGICAERTAIQKAVSEGYKDFRAIAIASDMQDDFISPCGACRQVMREFGTNWPVYMTKPDGTYIVMTVQELLPSSFGPEDLQKTQGGGGSGGGGSGGGGSGGGGSGGGGSGGGGSGGGGSGGGGSGGGGSGGGGSGGGGSDIQMTQSPSSVSASVGDRVTITCRASQGISSWLAWYQQKPGKAPKLLIYAASSLOQSGVPSRFSGSGSGTDFTLTISSLQPEDFATYYCQQTNSEPYTFGGGTKVEIKGGGGSGGGGSGGGGSEVQLLESGGGLVQPGGSLRLSCAASGETESSYVMIWVRQAPGKGLEWVSSISGDSVTTYYADSVKGRFTISRDNSKNTLYLOMNSLRAEDTAVYYCAKGPPTYHTNYYYMDVWGKGTTVTVSS

SEQ ID NO: 378 - protein, 466 aa, synthetic construct
MAQKRPACTLKPECVQQLLVCSQEAKKSAYCPYSHFPVGAALLTQEGRIFKGCNIENACYPLGICAERTAIQKAVSEGYKDFRAIAIASDMQDDFISPCGACRQVMREFGTNWPVYMTKPDGTYIVMTVQELLPSSFGPEDLQKTQGGGGSGGGGSGGGGSGGGGSGGGGSGGGGSGGGGSGGGGSGGGGSGGGGSGGGGSDIQMTQSPSSLSASVGDRVTITCRASQSISSYLNWYQQKPGKAPKLLIYAASSLQSGVPSRFSGSGSGTDFTLTISSLQPEDFATYYCQQSYIAPYTFGGGTKVEIKGGGGSGGGGSGGGGSEVQLVESGGGLVQPGGSLRLSCAASGETFSDHYMDWVRQAPGKGLASGETFSDHYMDWVRQAPGKGLEWVGRIRNKASSYTTEYAASVKGRFTISRDDSKNSLYLQMNSLKTEDTAVYYCAREPKYWIDFDLWGRGTLVTVSS

SEQ ID NO: 379 - protein, 443 aa, synthetic construct
MAQKRPACTLKPECVQQLLVCSQEAKKSAYCPYSHFPVGAALLTQEGRIFKGCNIENACYPLGICAERTAIQKAVSEGYKDFRAIAIASDMQDDFISPCGACRQVMREFGTNWPVYMTKPDGTYIVMTVQELLPSSFGPEDLQKTQGGGGSGGGGSGGGGSGGGGSGGGGSGGGGSGGGGSGGGGSGGGGSGGGGSGGGGSDIQMTQSPSSLSASVGDRVTITCRASQSISSYLNWYQQKPGKAPKLLIYAASSLQSGVPSRFSGSGSGTDFTLTISSLQPEDFATYYCQQSYIAPYTFGGGTKVEIKGGGGSGGGGSGGGGSEVQLVESGGGLVQPGRSLRLSCTASGFTFSDHDMNWVRQAPGKGLEWVGRTRNAAGSYTTEYAASVKGRFTISRDDSKNSLYLQMNSLKTEDTAVYYCAREPKYWIDFDLWGRGTLVTSS

SEQ ID NO: 380 - protein, 443 aa, synthetic construct
MAQKRPACTLKPECVQQLLVCSQEAKKSAYCPYSHFPVGAALLTQEGRIFKGCNIENACYPLGICAERTAIQKAVSEGYKDFRAIAIASDMQDDFISPCGACRQVMREFGTNWPVYMTKPDGTYIVMTVQELLPSSFGPEDLQKTQGGGGSGGGGSGGGGSGGGGSGGGGSGGGGSGGGGSGGGGSGGGGSGGGGSGGGGSEVQLVESGGGLVQPGGSLRLSCAASGETFVDHDMDWVRQAPGKGLEWVGRTRNKLGSYTTEYAASVKGRETGRDDSKNSLYLQMNSLKTEDTAVYYCAREPKYWIDFDLWGRGTLVTVSSGGGGSGGGGSGGGGSDIQMTQSPSSLSASVGDRVTITCRASQSISSYLNWYQQKPGKAPKLLIYAASSLQSGVPSRFSGSGSGTDFTLTISSLQPEDFATYYCQQSYIAPYIFGGGTKVEIK

SEQ ID NO: 381 - protein, 452 aa, synthetic construct
MAQKRPACTLKPECVQQLLVCSQEAKKSAYCPYSHFPVGAALLTQEGRIFKGCNIENACYPLGICAERTAIQKAVSEGYKDFRAIAIASDMQDDFISPCGACRQVMREFGTNWPVYMTKPDGTYIVMTVQELLPSSFGPEDLQKTQGGGGSGGGGSGGGGSGGGGSGGGGSGGGGSGGGGSGGGGSGGGGSGGGGSGGGGSGGGGSDIQMTQSPSSVSASVGDRVTITCRASQGISSWLAWYQQKPGKAPKLLLIYAASSLQSGVPSRFSGSGSGTDFTLTISSLQPEDFATYYCQQTNSFPYTFGGGTKVEIKGGGGSGGGGSGGGGSEVQLLESGGGLVQPGGSLRLSCAASGETFSNYAMSWVRQAPGKGLEWVSAISGSGGSTYYADSVKGRFTISRDNSKNTLYLQMNSLRAEDTAVYYCAKGPPTYHTNYYYMDVWGKGTTVTVSS

SEQ ID NO: 382 - protein, 452 aa, synthetic construct
MAQKRPACTLKPECVQQLLVCSQEAKKSAYCPYSHFPVGAALLTQEGRIFKGCNIENACYPLGICAERTAIQKAVSEGYKDFRAIAIASDMQDDFISPCGACRQVMREFGTNWPVYMTKPDGTYIVMTVQELLPSSFGPEDLQKTQGGGGSGGGGSGGGGSGGGGSGGGGSGGGGSGGGGSGGGGSGGGGSGGGGSGGGGSGGGGSDIQMTQSPSSVSASVGDRVTITCRASQGISSWLAWYQQKPGKAPKLLIYAASSLOQSGVPSRFSGSGSGTDFTLTISSLQPEDFATYYCQQTNSEPYTFGGGTKVEIKGGGGSGGGGSGGGGSEVQLLESGGGLVQPGGSLRLSCAASGETESSYVMIWVRQAPGKGLEWVSSISGDSVTTYYADSVKGRFTISRDNSKNTLYLOMNSLRAEDTAVYYCAKGPPTYHTNYYYMDVWGKGTTVTVSS

SEQ ID NO: 383 - protein, 471 aa, synthetic construct
MAQKRPACTLKPECVQQLLVCSQEAKKSAYCPYSHFPVGAALLTQEGRIFKGCNIENACYPLGICAERTAIQKAVSEGYKDFRAIAIASDMQDDFISPCGACRQVMREFGTNWPVYMTKPDGTYIVMTVQELLPSSFGPEDLQKTQGGGGSGGGGSGGGGSGGGGSGGGGSGGGGSGGGGSGGGGSGGGGSGGGGSGGGGSGGGGSDIQMTQSPSSLSASVGDRVTITCRASQSISSYLNWYQQKPGKAPKLLIYAASSLQSGVPSRFSGSGSGTDFTLTISSLQPEDFATYYCQQSYIAPYTFGGGTKVEIKGGGGSGGGGSGGGGSEVQLVESGGGLVQPGGSLRLSCAASGETFSDHYMDWVRQAPGKGLASGETFSDHYMDWVRQAPGKGLEWVGRIRNKASSYTTEYAASVKGRFTISRDDSKNSLYLQMNSLKTEDTAVYYCAREPKYWIDFDLWGRGTLVTVSS

SEQ ID NO: 384 - protein, 448 aa, synthetic construct
MAQKRPACTLKPECVQQLLVCSQEAKKSAYCPYSHFPVGAALLTQEGRIFKGCNIENACYPLGICAERTAIQKAVSEGYKDFRAIAIASDMQDDFISPCGACRQVMREFGTNWPVYMTKPDGTYIVMTVQELLPSSFGPEDLQKTQGGGGSGGGGSGGGGSGGGGSGGGGSGGGGSGGGGSGGGGSGGGGSGGGGSGGGGSGGGGSDIQMTQSPSSLSASVGDRVTITCRASQSISSYLNWYQQKPGKAPKLLIYAASSLQSGVPSRFSGSGSGTDFTLTISSLQPEDFATYYCQQSYIAPYTFGGGTKVEIKGGGGSGGGGSGGGGSEVQLVESGGGLVQPGRSLRLSCTASGFTFSDHDMNWVRQAPGKGLEWVGRTRNAAGSYTTEYAASVKGRFTISRDDSKNSLYLQMNSLKTEDTAVYYCAREPKYWIDFDLWGRGTLVTSS

SEQ ID NO: 385 - protein, 448 aa, synthetic construct
MAQKRPACTLKPECVQQLLVCSQEAKKSAYCPYSHFPVGAALLTQEGRIFKGCNIENACYPLGICAERTAIQKAVSEGYKDFRAIAIASDMQDDFISPCGACRQVMREFGTNWPVYMTKPDGTYIVMTVQELLPSSFGPEDLQKTQGGGGSGGGGSGGGGSGGGGSGGGGSGGGGSGGGGSGGGGSGGGGSGGGGSGGGGSGGGGSEVQLVESGGGLVQPGGSLRLSCAASGETFVDHDMDWVRQAPGKGLEWVGRTRNKLGSYTTEYAASVKGRETGRDDSKNSLYLQMNSLKTEDTAVYYCAREPKYWIDFDLWGRGTLVTVSSGGGGSGGGGSGGGGSDIQMTQSPSSLSASVGDRVTITCRASQSISSYLNWYQQKPGKAPKLLIYAASSLQSGVPSRFSGSGSGTDFTLTISSLQPEDFATYYCQQSYIAPYIFGGGTKVEIK

SEQ ID NO: 386 - protein, 397 aa, synthetic construct
MAQKRPACTLKPECVQQLLVCSQEAKKSAYCPYSHFPVGAALLTQEGRIFKGCNIENACYPLGICAERTAIQKAVSEGYKDFRAIAIASDMQDDFISPCGACRQVMREFGTNWPVYMTKPDGTYIVMTVQELLPSSFGPEDLQKTQGGGGSEVQLLESGGGLVQPGGSLRLSCAASGETFSNYAMSWVRQAPGKGLEWVSAISGSGGSTYYADSVKGRFTISRDNSKNTLYLQMNSLRAEDTAVYYCAKGPPTYHTNYYYMDVWGKGTTVTVSSGGGGSGGGGSGGGGSDIQMTQSPSSVSASVGDRVTITCRASQGISSWLAWYQQKPGKAPKLLLIYAASSLQSGVPSRFSGSGSGTDFTLTISSLQPEDFATYYCQQTNSFPYTFGGGTKVEIK

SEQ ID NO: 387 - protein, 397 aa, synthetic construct
MAQKRPACTLKPECVQQLLVCSQEAKKSAYCPYSHFPVGAALLTQEGRIFKGCNIENACYPLGICAERTAIQKAVSEGYKDFRAIAIASDMQDDFISPCGACRQVMREFGTNWPVYMTKPDGTYIVMTVQELLPSSFGPEDLQKTQGGGGSEVQLLESGGGLVQPGGSLRLSCAASGETESSYVMIWVRQAPGKGLEWVSSISGDSVTTYYADSVKGRFTISRDNSKNTLYLOMNSLRAEDTAVYYCAKGPPTYHTNYYYMDVWGKGTTVTVSSGGGGSGGGGSGGGGSDIQMTQSPSSVSASVGDRVTITCRASQGISSWLAWYQQKPGKAPKLLIYAASSLOQSGVPSRFSGSGSGTDFTLTISSLQPEDFATYYCQQTNSEPYTFGGGTKVEIK

SEQ ID NO: 388 - protein, 416 aa, synthetic construct
MAQKRPACTLKPECVQQLLVCSQEAKKSAYCPYSHFPVGAALLTQEGRIFKGCNIENACYPLGICAERTAIQKAVSEGYKDFRAIAIASDMQDDFISPCGACRQVMREFGTNWPVYMTKPDGTYIVMTVQELLPSSFGPEDLQKTQGGGGSEVQLVESGGGLVQPGGSLRLSCAASGETFSDHYMDWVRQAPGKGLASGETFSDHYMDWVRQAPGKGLEWVGRIRNKASSYTTEYAASVKGRFTISRDDSKNSLYLQMNSLKTEDTAVYYCAREPKYWIDFDLWGRGTLVTVSSGGGGSGGGGSGGGGSDIQMTQSPSSLSASVGDRVTITCRASQSISSYLNWYQQKPGKAPKLLIYAASSLQSGVPSRFSGSGSGTDFTLTISSLQPEDFATYYCQQSYIAPYTFGGGTKVEIK

SEQ ID NO: 389 - protein, 393 aa, synthetic construct
MAQKRPACTLKPECVQQLLVCSQEAKKSAYCPYSHFPVGAALLTQEGRIFKGCNIENACYPLGICAERTAIQKAVSEGYKDFRAIAIASDMQDDFISPCGACRQVMREFGTNWPVYMTKPDGTYIVMTVQELLPSSFGPEDLQKTQGGGGSEVQLVESGGGLVQPGRSLRLSCTASGFTFSDHDMNWVRQAPGKGLEWVGRTRNAAGSYTTEYAASVKGRFTISRDDSKNSLYLQMNSLKTEDTAVYYCAREPKYWIDFDLWGRGTLVTSSGGGGSGGGGSGGGGSDIQMTQSPSSLSASVGDRVTITCRASQSISSYLNWYQQKPGKAPKLLIYAASSLQSGVPSRFSGSGSGTDFTLTISSLQPEDFATYYCQQSYIAPYTFGGGTKVEIK

SEQ ID NO: 390 - protein, 393 aa, synthetic construct
MAQKRPACTLKPECVQQLLVCSQEAKKSAYCPYSHFPVGAALLTQEGRIFKGCNIENACYPLGICAERTAIQKAVSEGYKDFRAIAIASDMQDDFISPCGACRQVMREFGTNWPVYMTKPDGTYIVMTVQELLPSSFGPEDLQKTQGGGGSDIQMTQSPSSLSASVGDRVTITCRASQSISSYLNWYQQKPGKAPKLLIYAASSLQSGVPSRFSGSGSGTDFTLTISSLQPEDFATYYCQQSYIAPYIFGGGTKVEIKGGGGSGGGGSGGGGSEVQLVESGGGLVQPGGSLRLSCAASGETFVDHDMDWVRQAPGKGLEWVGRTRNKLGSYTTEYAASVKGRETGRDDSKNSLYLQMNSLKTEDTAVYYCAREPKYWIDFDLWGRGTLVTVSS

SEQ ID NO: 391 - protein, 407 aa, synthetic construct
MAQKRPACTLKPECVQQLLVCSQEAKKSAYCPYSHFPVGAALLTQEGRIFKGCNIENACYPLGICAERTAIQKAVSEGYKDFRAIAIASDMQDDFISPCGACRQVMREFGTNWPVYMTKPDGTYIVMTVQELLPSSFGPEDLQKTQGGGGSGGGGSGGGGSEVQLLESGGGLVQPGGSLRLSCAASGETFSNYAMSWVRQAPGKGLEWVSAISGSGGSTYYADSVKGRFTISRDNSKNTLYLQMNSLRAEDTAVYYCAKGPPTYHTNYYYMDVWGKGTTVTVSSGGGGSGGGGSGGGGSDIQMTQSPSSVSASVGDRVTITCRASQGISSWLAWYQQKPGKAPKLLLIYAASSLQSGVPSRFSGSGSGTDFTLTISSLQPEDFATYYCQQTNSFPYTFGGGTKVEIK

SEQ ID NO: 392 - protein, 407 aa, synthetic construct
MAQKRPACTLKPECVQQLLVCSQEAKKSAYCPYSHFPVGAALLTQEGRIFKGCNIENACYPLGICAERTAIQKAVSEGYKDFRAIAIASDMQDDFISPCGACRQVMREFGTNWPVYMTKPDGTYIVMTVQELLPSSFGPEDLQKTQGGGGSGGGGSGGGGSEVQLLESGGGLVQPGGSLRLSCAASGETESSYVMIWVRQAPGKGLEWVSSISGDSVTTYYADSVKGRFTISRDNSKNTLYLOMNSLRAEDTAVYYCAKGPPTYHTNYYYMDVWGKGTTVTVSSGGGGSGGGGSGGGGSDIQMTQSPSSVSASVGDRVTITCRASQGISSWLAWYQQKPGKAPKLLIYAASSLOQSGVPSRFSGSGSGTDFTLTISSLQPEDFATYYCQQTNSEPYTFGGGTKVEIK

SEQ ID NO: 393 - protein, 426 aa, synthetic construct
MAQKRPACTLKPECVQQLLVCSQEAKKSAYCPYSHFPVGAALLTQEGRIFKGCNIENACYPLGICAERTAIQKAVSEGYKDFRAIAIASDMQDDFISPCGACRQVMREFGTNWPVYMTKPDGTYIVMTVQELLPSSFGPEDLQKTQGGGGSGGGGSGGGGSEVQLVESGGGLVQPGGSLRLSCAASGETFSDHYMDWVRQAPGKGLASGETFSDHYMDWVRQAPGKGLEWVGRIRNKASSYTTEYAASVKGRFTISRDDSKNSLYLQMNSLKTEDTAVYYCAREPKYWIDFDLWGRGTLVTVSSGGGGSGGGGSGGGGSDIQMTQSPSSLSASVGDRVTITCRASQSISSYLNWYQQKPGKAPKLLIYAASSLQSGVPSRFSGSGSGTDFTLTISSLQPEDFATYYCQQSYIAPYTFGGGTKVEIK

SEQ ID NO: 394 - protein, 403 aa, synthetic construct
MAQKRPACTLKPECVQQLLVCSQEAKKSAYCPYSHFPVGAALLTQEGRIFKGCNIENACYPLGICAERTAIQKAVSEGYKDFRAIAIASDMQDDFISPCGACRQVMREFGTNWPVYMTKPDGTYIVMTVQELLPSSFGPEDLQKTQGGGGSGGGGSGGGGSEVQLVESGGGLVQPGRSLRLSCTASGFTFSDHDMNWVRQAPGKGLEWVGRTRNAAGSYTTEYAASVKGRFTISRDDSKNSLYLQMNSLKTEDTAVYYCAREPKYWIDFDLWGRGTLVTSSGGGGSGGGGSGGGGSDIQMTQSPSSLSASVGDRVTITCRASQSISSYLNWYQQKPGKAPKLLIYAASSLQSGVPSRFSGSGSGTDFTLTISSLQPEDFATYYCQQSYIAPYTFGGGTKVEIK

SEQ ID NO: 395 - protein, 403 aa, synthetic construct
MAQKRPACTLKPECVQQLLVCSQEAKKSAYCPYSHFPVGAALLTQEGRIFKGCNIENACYPLGICAERTAIQKAVSEGYKDFRAIAIASDMQDDFISPCGACRQVMREFGTNWPVYMTKPDGTYIVMTVQELLPSSFGPEDLQKTQGGGGSGGGGSGGGGSDIQMTQSPSSLSASVGDRVTITCRASQSISSYLNWYQQKPGKAPKLLIYAASSLQSGVPSRFSGSGSGTDFTLTISSLQPEDFATYYCQQSYIAPYIFGGGTKVEIKGGGGSGGGGSGGGGSEVQLVESGGGLVQPGGSLRLSCAASGETFVDHDMDWVRQAPGKGLEWVGRTRNKLGSYTTEYAASVKGRETGRDDSKNSLYLQMNSLKTEDTAVYYCAREPKYWIDFDLWGRGTLVTVSS

SEQ ID NO: 396 - protein, 412 aa, synthetic construct
MAQKRPACTLKPECVQQLLVCSQEAKKSAYCPYSHFPVGAALLTQEGRIFKGCNIENACYPLGICAERTAIQKAVSEGYKDFRAIAIASDMQDDFISPCGACRQVMREFGTNWPVYMTKPDGTYIVMTVQELLPSSFGPEDLQKTQGGGGSGGGGSGGGGSGGGGSEVQLLESGGGLVQPGGSLRLSCAASGETFSNYAMSWVRQAPGKGLEWVSAISGSGGSTYYADSVKGRFTISRDNSKNTLYLQMNSLRAEDTAVYYCAKGPPTYHTNYYYMDVWGKGTTVTVSSGGGGSGGGGSGGGGSDIQMTQSPSSVSASVGDRVTITCRASQGISSWLAWYQQKPGKAPKLLLIYAASSLQSGVPSRFSGSGSGTDFTLTISSLQPEDFATYYCQQTNSFPYTFGGGTKVEIK

SEQ ID NO: 397 - protein, 412 aa, synthetic construct
MAQKRPACTLKPECVQQLLVCSQEAKKSAYCPYSHFPVGAALLTQEGRIFKGCNIENACYPLGICAERTAIQKAVSEGYKDFRAIAIASDMQDDFISPCGACRQVMREFGTNWPVYMTKPDGTYIVMTVQELLPSSFGPEDLQKTQGGGGSGGGGSGGGGSGGGGSEVQLLESGGGLVQPGGSLRLSCAASGETESSYVMIWVRQAPGKGLEWVSSISGDSVTTYYADSVKGRFTISRDNSKNTLYLOMNSLRAEDTAVYYCAKGPPTYHTNYYYMDVWGKGTTVTVSSGGGGSGGGGSGGGGSDIQMTQSPSSVSASVGDRVTITCRASQGISSWLAWYQQKPGKAPKLLIYAASSLOQSGVPSRFSGSGSGTDFTLTISSLQPEDFATYYCQQTNSEPYTFGGGTKVEIK

SEQ ID NO: 398 - protein, 431 aa, synthetic construct
MAQKRPACTLKPECVQQLLVCSQEAKKSAYCPYSHFPVGAALLTQEGRIFKGCNIENACYPLGICAERTAIQKAVSEGYKDFRAIAIASDMQDDFISPCGACRQVMREFGTNWPVYMTKPDGTYIVMTVQELLPSSFGPEDLQKTQGGGGSGGGGSGGGGSGGGGSEVQLVESGGGLVQPGGSLRLSCAASGETFSDHYMDWVRQAPGKGLASGETFSDHYMDWVRQAPGKGLEWVGRIRNKASSYTTEYAASVKGRFTISRDDSKNSLYLQMNSLKTEDTAVYYCAREPKYWIDFDLWGRGTLVTVSSGGGGSGGGGSGGGGSDIQMTQSPSSLSASVGDRVTITCRASQSISSYLNWYQQKPGKAPKLLIYAASSLQSGVPSRFSGSGSGTDFTLTISSLQPEDFATYYCQQSYIAPYTFGGGTKVEIK

SEQ ID NO: 399 - protein, 408 aa, synthetic construct
MAQKRPACTLKPECVQQLLVCSQEAKKSAYCPYSHFPVGAALLTQEGRIFKGCNIENACYPLGICAERTAIQKAVSEGYKDFRAIAIASDMQDDFISPCGACRQVMREFGTNWPVYMTKPDGTYIVMTVQELLPSSFGPEDLQKTQGGGGSGGGGSGGGGSGGGGSEVQLVESGGGLVQPGRSLRLSCTASGFTFSDHDMNWVRQAPGKGLEWVGRTRNAAGSYTTEYAASVKGRFTISRDDSKNSLYLQMNSLKTEDTAVYYCAREPKYWIDFDLWGRGTLVTSSGGGGSGGGGSGGGGSDIQMTQSPSSLSASVGDRVTITCRASQSISSYLNWYQQKPGKAPKLLIYAASSLQSGVPSRFSGSGSGTDFTLTISSLQPEDFATYYCQQSYIAPYTFGGGTKVEIK

SEQ ID NO: 400 - protein, 408 aa, synthetic construct
MAQKRPACTLKPECVQQLLVCSQEAKKSAYCPYSHFPVGAALLTQEGRIFKGCNIENACYPLGICAERTAIQKAVSEGYKDFRAIAIASDMQDDFISPCGACRQVMREFGTNWPVYMTKPDGTYIVMTVQELLPSSFGPEDLQKTQGGGGSGGGGSGGGGSGGGGSDIQMTQSPSSLSASVGDRVTITCRASQSISSYLNWYQQKPGKAPKLLIYAASSLQSGVPSRFSGSGSGTDFTLTISSLQPEDFATYYCQQSYIAPYIFGGGTKVEIKGGGGSGGGGSGGGGSEVQLVESGGGLVQPGGSLRLSCAASGETFVDHDMDWVRQAPGKGLEWVGRTRNKLGSYTTEYAASVKGRETGRDDSKNSLYLQMNSLKTEDTAVYYCAREPKYWIDFDLWGRGTLVTVSS

SEQ ID NO: 401 - protein, 417 aa, synthetic construct
MAQKRPACTLKPECVQQLLVCSQEAKKSAYCPYSHFPVGAALLTQEGRIFKGCNIENACYPLGICAERTAIQKAVSEGYKDFRAIAIASDMQDDFISPCGACRQVMREFGTNWPVYMTKPDGTYIVMTVQELLPSSFGPEDLQKTQGGGGSGGGGSGGGGSGGGGSGGGGSEVQLLESGGGLVQPGGSLRLSCAASGETFSNYAMSWVRQAPGKGLEWVSAISGSGGSTYYADSVKGRFTISRDNSKNTLYLQMNSLRAEDTAVYYCAKGPPTYHTNYYYMDVWGKGTTVTVSSGGGGSGGGGSGGGGSDIQMTQSPSSVSASVGDRVTITCRASQGISSWLAWYQQKPGKAPKLLLIYAASSLQSGVPSRFSGSGSGTDFTLTISSLQPEDFATYYCQQTNSFPYTFGGGTKVEIK

SEQ ID NO: 402 - protein, 417 aa, synthetic construct
MAQKRPACTLKPECVQQLLVCSQEAKKSAYCPYSHFPVGAALLTQEGRIFKGCNIENACYPLGICAERTAIQKAVSEGYKDFRAIAIASDMQDDFISPCGACRQVMREFGTNWPVYMTKPDGTYIVMTVQELLPSSFGPEDLQKTQGGGGSGGGGSGGGGSGGGGSGGGGSEVQLLESGGGLVQPGGSLRLSCAASGETESSYVMIWVRQAPGKGLEWVSSISGDSVTTYYADSVKGRFTISRDNSKNTLYLOMNSLRAEDTAVYYCAKGPPTYHTNYYYMDVWGKGTTVTVSSGGGGSGGGGSGGGGSDIQMTQSPSSVSASVGDRVTITCRASQGISSWLAWYQQKPGKAPKLLIYAASSLOQSGVPSRFSGSGSGTDFTLTISSLQPEDFATYYCQQTNSEPYTFGGGTKVEIK

SEQ ID NO: 403 - protein, 436 aa, synthetic construct
MAQKRPACTLKPECVQQLLVCSQEAKKSAYCPYSHFPVGAALLTQEGRIFKGCNIENACYPLGICAERTAIQKAVSEGYKDFRAIAIASDMQDDFISPCGACRQVMREFGTNWPVYMTKPDGTYIVMTVQELLPSSFGPEDLQKTQGGGGSGGGGSGGGGSGGGGSGGGGSEVQLVESGGGLVQPGGSLRLSCAASGETFSDHYMDWVRQAPGKGLASGETFSDHYMDWVRQAPGKGLEWVGRIRNKASSYTTEYAASVKGRFTISRDDSKNSLYLQMNSLKTEDTAVYYCAREPKYWIDFDLWGRGTLVTVSSGGGGSGGGGSGGGGSDIQMTQSPSSLSASVGDRVTITCRASQSISSYLNWYQQKPGKAPKLLIYAASSLQSGVPSRFSGSGSGTDFTLTISSLQPEDFATYYCQQSYIAPYTFGGGTKVEIK

SEQ ID NO: 404 - protein, 413 aa, synthetic construct
MAQKRPACTLKPECVQQLLVCSQEAKKSAYCPYSHFPVGAALLTQEGRIFKGCNIENACYPLGICAERTAIQKAVSEGYKDFRAIAIASDMQDDFISPCGACRQVMREFGTNWPVYMTKPDGTYIVMTVQELLPSSFGPEDLQKTQGGGGSGGGGSGGGGSGGGGSGGGGSEVQLVESGGGLVQPGRSLRLSCTASGFTFSDHDMNWVRQAPGKGLEWVGRTRNAAGSYTTEYAASVKGRFTISRDDSKNSLYLQMNSLKTEDTAVYYCAREPKYWIDFDLWGRGTLVTSSGGGGSGGGGSGGGGSDIQMTQSPSSLSASVGDRVTITCRASQSISSYLNWYQQKPGKAPKLLIYAASSLQSGVPSRFSGSGSGTDFTLTISSLQPEDFATYYCQQSYIAPYTFGGGTKVEIK

SEQ ID NO: 405 - protein, 413 aa, synthetic construct
MAQKRPACTLKPECVQQLLVCSQEAKKSAYCPYSHFPVGAALLTQEGRIFKGCNIENACYPLGICAERTAIQKAVSEGYKDFRAIAIASDMQDDFISPCGACRQVMREFGTNWPVYMTKPDGTYIVMTVQELLPSSFGPEDLQKTQGGGGSGGGGSGGGGSGGGGSGGGGSDIQMTQSPSSLSASVGDRVTITCRASQSISSYLNWYQQKPGKAPKLLIYAASSLQSGVPSRFSGSGSGTDFTLTISSLQPEDFATYYCQQSYIAPYIFGGGTKVEIKGGGGSGGGGSGGGGSEVQLVESGGGLVQPGGSLRLSCAASGETFVDHDMDWVRQAPGKGLEWVGRTRNKLGSYTTEYAASVKGRETGRDDSKNSLYLQMNSLKTEDTAVYYCAREPKYWIDFDLWGRGTLVTVSS

SEQ ID NO: 406 - protein, 422 aa, synthetic construct
MAQKRPACTLKPECVQQLLVCSQEAKKSAYCPYSHFPVGAALLTQEGRIFKGCNIENACYPLGICAERTAIQKAVSEGYKDFRAIAIASDMQDDFISPCGACRQVMREFGTNWPVYMTKPDGTYIVMTVQELLPSSFGPEDLQKTQGGGGSGGGGSGGGGSGGGGSGGGGSGGGGSEVQLLESGGGLVQPGGSLRLSCAASGETFSNYAMSWVRQAPGKGLEWVSAISGSGGSTYYADSVKGRFTISRDNSKNTLYLQMNSLRAEDTAVYYCAKGPPTYHTNYYYMDVWGKGTTVTVSSGGGGSGGGGSGGGGSDIQMTQSPSSVSASVGDRVTITCRASQGISSWLAWYQQKPGKAPKLLLIYAASSLQSGVPSRFSGSGSGTDFTLTISSLQPEDFATYYCQQTNSFPYTFGGGTKVEIK

SEQ ID NO: 407 - protein, 422 aa, synthetic construct
MAQKRPACTLKPECVQQLLVCSQEAKKSAYCPYSHFPVGAALLTQEGRIFKGCNIENACYPLGICAERTAIQKAVSEGYKDFRAIAIASDMQDDFISPCGACRQVMREFGTNWPVYMTKPDGTYIVMTVQELLPSSFGPEDLQKTQGGGGSGGGGSGGGGSGGGGSGGGGSGGGGSEVQLLESGGGLVQPGGSLRLSCAASGETESSYVMIWVRQAPGKGLEWVSSISGDSVTTYYADSVKGRFTISRDNSKNTLYLOMNSLRAEDTAVYYCAKGPPTYHTNYYYMDVWGKGTTVTVSSGGGGSGGGGSGGGGSDIQMTQSPSSVSASVGDRVTITCRASQGISSWLAWYQQKPGKAPKLLIYAASSLOQSGVPSRFSGSGSGTDFTLTISSLQPEDFATYYCQQTNSEPYTFGGGTKVEIK

SEQ ID NO: 408 - protein, 441 aa, synthetic construct
MAQKRPACTLKPECVQQLLVCSQEAKKSAYCPYSHFPVGAALLTQEGRIFKGCNIENACYPLGICAERTAIQKAVSEGYKDFRAIAIASDMQDDFISPCGACRQVMREFGTNWPVYMTKPDGTYIVMTVQELLPSSFGPEDLQKTQGGGGSGGGGSGGGGSGGGGSGGGGSGGGGSEVQLVESGGGLVQPGGSLRLSCAASGETFSDHYMDWVRQAPGKGLASGETFSDHYMDWVRQAPGKGLEWVGRIRNKASSYTTEYAASVKGRFTISRDDSKNSLYLQMNSLKTEDTAVYYCAREPKYWIDFDLWGRGTLVTVSSGGGGSGGGGSGGGGSDIQMTQSPSSLSASVGDRVTITCRASQSISSYLNWYQQKPGKAPKLLIYAASSLQSGVPSRFSGSGSGTDFTLTISSLQPEDFATYYCQQSYIAPYTFGGGTKVEIK

SEQ ID NO: 409 - protein, 418 aa, synthetic construct
MAQKRPACTLKPECVQQLLVCSQEAKKSAYCPYSHFPVGAALLTQEGRIFKGCNIENACYPLGICAERTAIQKAVSEGYKDFRAIAIASDMQDDFISPCGACRQVMREFGTNWPVYMTKPDGTYIVMTVQELLPSSFGPEDLQKTQGGGGSGGGGSGGGGSGGGGSGGGGSGGGGSEVQLVESGGGLVQPGRSLRLSCTASGFTFSDHDMNWVRQAPGKGLEWVGRTRNAAGSYTTEYAASVKGRFTISRDDSKNSLYLQMNSLKTEDTAVYYCAREPKYWIDFDLWGRGTLVTSSGGGGSGGGGSGGGGSDIQMTQSPSSLSASVGDRVTITCRASQSISSYLNWYQQKPGKAPKLLIYAASSLQSGVPSRFSGSGSGTDFTLTISSLQPEDFATYYCQQSYIAPYTFGGGTKVEIK

SEQ ID NO: 410 - protein, 418 aa, synthetic construct
MAQKRPACTLKPECVQQLLVCSQEAKKSAYCPYSHFPVGAALLTQEGRIFKGCNIENACYPLGICAERTAIQKAVSEGYKDFRAIAIASDMQDDFISPCGACRQVMREFGTNWPVYMTKPDGTYIVMTVQELLPSSFGPEDLQKTQGGGGSGGGGSGGGGSGGGGSGGGGSGGGGSDIQMTQSPSSLSASVGDRVTITCRASQSISSYLNWYQQKPGKAPKLLIYAASSLQSGVPSRFSGSGSGTDFTLTISSLQPEDFATYYCQQSYIAPYIFGGGTKVEIKGGGGSGGGGSGGGGSEVQLVESGGGLVQPGGSLRLSCAASGETFVDHDMDWVRQAPGKGLEWVGRTRNKLGSYTTEYAASVKGRETGRDDSKNSLYLQMNSLKTEDTAVYYCAREPKYWIDFDLWGRGTLVTVSS

SEQ ID NO: 411 - protein, 427 aa, synthetic construct
MAQKRPACTLKPECVQQLLVCSQEAKKSAYCPYSHFPVGAALLTQEGRIFKGCNIENACYPLGICAERTAIQKAVSEGYKDFRAIAIASDMQDDFISPCGACRQVMREFGTNWPVYMTKPDGTYIVMTVQELLPSSFGPEDLQKTQGGGGSGGGGSGGGGSGGGGSGGGGSGGGGSGGGGSEVQLLESGGGLVQPGGSLRLSCAASGETFSNYAMSWVRQAPGKGLEWVSAISGSGGSTYYADSVKGRFTISRDNSKNTLYLQMNSLRAEDTAVYYCAKGPPTYHTNYYYMDVWGKGTTVTVSSGGGGSGGGGSGGGGSDIQMTQSPSSVSASVGDRVTITCRASQGISSWLAWYQQKPGKAPKLLLIYAASSLQSGVPSRFSGSGSGTDFTLTISSLQPEDFATYYCQQTNSFPYTFGGGTKVEIK

SEQ ID NO: 412 - protein, 427 aa, synthetic construct
MAQKRPACTLKPECVQQLLVCSQEAKKSAYCPYSHFPVGAALLTQEGRIFKGCNIENACYPLGICAERTAIQKAVSEGYKDFRAIAIASDMQDDFISPCGACRQVMREFGTNWPVYMTKPDGTYIVMTVQELLPSSFGPEDLQKTQGGGGSGGGGSGGGGSGGGGSGGGGSGGGGSGGGGSEVQLLESGGGLVQPGGSLRLSCAASGETESSYVMIWVRQAPGKGLEWVSSISGDSVTTYYADSVKGRFTISRDNSKNTLYLOMNSLRAEDTAVYYCAKGPPTYHTNYYYMDVWGKGTTVTVSSGGGGSGGGGSGGGGSDIQMTQSPSSVSASVGDRVTITCRASQGISSWLAWYQQKPGKAPKLLIYAASSLOQSGVPSRFSGSGSGTDFTLTISSLQPEDFATYYCQQTNSEPYTFGGGTKVEIK

SEQ ID NO: 413 - protein, 446 aa, synthetic construct
MAQKRPACTLKPECVQQLLVCSQEAKKSAYCPYSHFPVGAALLTQEGRIFKGCNIENACYPLGICAERTAIQKAVSEGYKDFRAIAIASDMQDDFISPCGACRQVMREFGTNWPVYMTKPDGTYIVMTVQELLPSSFGPEDLQKTQGGGGSGGGGSGGGGSGGGGSGGGGSGGGGSGGGGSEVQLVESGGGLVQPGGSLRLSCAASGETFSDHYMDWVRQAPGKGLASGETFSDHYMDWVRQAPGKGLEWVGRIRNKASSYTTEYAASVKGRFTISRDDSKNSLYLQMNSLKTEDTAVYYCAREPKYWIDFDLWGRGTLVTVSSGGGGSGGGGSGGGGSDIQMTQSPSSLSASVGDRVTITCRASQSISSYLNWYQQKPGKAPKLLIYAASSLQSGVPSRFSGSGSGTDFTLTISSLQPEDFATYYCQQSYIAPYTFGGGTKVEIK

SEQ ID NO: 414 - protein, 423 aa, synthetic construct
MAQKRPACTLKPECVQQLLVCSQEAKKSAYCPYSHFPVGAALLTQEGRIFKGCNIENACYPLGICAERTAIQKAVSEGYKDFRAIAIASDMQDDFISPCGACRQVMREFGTNWPVYMTKPDGTYIVMTVQELLPSSFGPEDLQKTQGGGGSGGGGSGGGGSGGGGSGGGGSGGGGSGGGGSEVQLVESGGGLVQPGRSLRLSCTASGFTFSDHDMNWVRQAPGKGLEWVGRTRNAAGSYTTEYAASVKGRFTISRDDSKNSLYLQMNSLKTEDTAVYYCAREPKYWIDFDLWGRGTLVTSSGGGGSGGGGSGGGGSDIQMTQSPSSLSASVGDRVTITCRASQSISSYLNWYQQKPGKAPKLLIYAASSLQSGVPSRFSGSGSGTDFTLTISSLQPEDFATYYCQQSYIAPYTFGGGTKVEIK

SEQ ID NO: 415 - protein, 423 aa, synthetic construct
MAQKRPACTLKPECVQQLLVCSQEAKKSAYCPYSHFPVGAALLTQEGRIFKGCNIENACYPLGICAERTAIQKAVSEGYKDFRAIAIASDMQDDFISPCGACRQVMREFGTNWPVYMTKPDGTYIVMTVQELLPSSFGPEDLQKTQGGGGSGGGGSGGGGSGGGGSGGGGSGGGGSGGGGSDIQMTQSPSSLSASVGDRVTITCRASQSISSYLNWYQQKPGKAPKLLIYAASSLQSGVPSRFSGSGSGTDFTLTISSLQPEDFATYYCQQSYIAPYIFGGGTKVEIKGGGGSGGGGSGGGGSEVQLVESGGGLVQPGGSLRLSCAASGETFVDHDMDWVRQAPGKGLEWVGRTRNKLGSYTTEYAASVKGRETGRDDSKNSLYLQMNSLKTEDTAVYYCAREPKYWIDFDLWGRGTLVTVSS

SEQ ID NO: 416 - protein, 432 aa, synthetic construct
MAQKRPACTLKPECVQQLLVCSQEAKKSAYCPYSHFPVGAALLTQEGRIFKGCNIENACYPLGICAERTAIQKAVSEGYKDFRAIAIASDMQDDFISPCGACRQVMREFGTNWPVYMTKPDGTYIVMTVQELLPSSFGPEDLQKTQGGGGSGGGGSGGGGSGGGGSGGGGSGGGGSGGGGSGGGGSEVQLLESGGGLVQPGGSLRLSCAASGETFSNYAMSWVRQAPGKGLEWVSAISGSGGSTYYADSVKGRFTISRDNSKNTLYLQMNSLRAEDTAVYYCAKGPPTYHTNYYYMDVWGKGTTVTVSSGGGGSGGGGSGGGGSDIQMTQSPSSVSASVGDRVTITCRASQGISSWLAWYQQKPGKAPKLLLIYAASSLQSGVPSRFSGSGSGTDFTLTISSLQPEDFATYYCQQTNSFPYTFGGGTKVEIK

SEQ ID NO: 417 - protein, 432 aa, synthetic construct
MAQKRPACTLKPECVQQLLVCSQEAKKSAYCPYSHFPVGAALLTQEGRIFKGCNIENACYPLGICAERTAIQKAVSEGYKDFRAIAIASDMQDDFISPCGACRQVMREFGTNWPVYMTKPDGTYIVMTVQELLPSSFGPEDLQKTQGGGGSGGGGSGGGGSGGGGSGGGGSGGGGSGGGGSGGGGSEVQLLESGGGLVQPGGSLRLSCAASGETESSYVMIWVRQAPGKGLEWVSSISGDSVTTYYADSVKGRFTISRDNSKNTLYLOMNSLRAEDTAVYYCAKGPPTYHTNYYYMDVWGKGTTVTVSSGGGGSGGGGSGGGGSDIQMTQSPSSVSASVGDRVTITCRASQGISSWLAWYQQKPGKAPKLLIYAASSLOQSGVPSRFSGSGSGTDFTLTISSLQPEDFATYYCQQTNSEPYTFGGGTKVEIK

SEQ ID NO: 418 - protein, 451 aa, synthetic construct
MAQKRPACTLKPECVQQLLVCSQEAKKSAYCPYSHFPVGAALLTQEGRIFKGCNIENACYPLGICAERTAIQKAVSEGYKDFRAIAIASDMQDDFISPCGACRQVMREFGTNWPVYMTKPDGTYIVMTVQELLPSSFGPEDLQKTQGGGGSGGGGSGGGGSGGGGSGGGGSGGGGSGGGGSGGGGSEVQLVESGGGLVQPGGSLRLSCAASGETFSDHYMDWVRQAPGKGLASGETFSDHYMDWVRQAPGKGLEWVGRIRNKASSYTTEYAASVKGRFTISRDDSKNSLYLQMNSLKTEDTAVYYCAREPKYWIDFDLWGRGTLVTVSSGGGGSGGGGSGGGGSDIQMTQSPSSLSASVGDRVTITCRASQSISSYLNWYQQKPGKAPKLLIYAASSLQSGVPSRFSGSGSGTDFTLTISSLQPEDFATYYCQQSYIAPYTFGGGTKVEIK

SEQ ID NO: 419 - protein, 428 aa, synthetic construct
MAQKRPACTLKPECVQQLLVCSQEAKKSAYCPYSHFPVGAALLTQEGRIFKGCNIENACYPLGICAERTAIQKAVSEGYKDFRAIAIASDMQDDFISPCGACRQVMREFGTNWPVYMTKPDGTYIVMTVQELLPSSFGPEDLQKTQGGGGSGGGGSGGGGSGGGGSGGGGSGGGGSGGGGSGGGGSEVQLVESGGGLVQPGRSLRLSCTASGFTFSDHDMNWVRQAPGKGLEWVGRTRNAAGSYTTEYAASVKGRFTISRDDSKNSLYLQMNSLKTEDTAVYYCAREPKYWIDFDLWGRGTLVTSSGGGGSGGGGSGGGGSDIQMTQSPSSLSASVGDRVTITCRASQSISSYLNWYQQKPGKAPKLLIYAASSLQSGVPSRFSGSGSGTDFTLTISSLQPEDFATYYCQQSYIAPYTFGGGTKVEIK

SEQ ID NO: 420 - protein, 428 aa, synthetic construct
MAQKRPACTLKPECVQQLLVCSQEAKKSAYCPYSHFPVGAALLTQEGRIFKGCNIENACYPLGICAERTAIQKAVSEGYKDFRAIAIASDMQDDFISPCGACRQVMREFGTNWPVYMTKPDGTYIVMTVQELLPSSFGPEDLQKTQGGGGSGGGGSGGGGSGGGGSGGGGSGGGGSGGGGSGGGGSDIQMTQSPSSLSASVGDRVTITCRASQSISSYLNWYQQKPGKAPKLLIYAASSLQSGVPSRFSGSGSGTDFTLTISSLQPEDFATYYCQQSYIAPYIFGGGTKVEIKGGGGSGGGGSGGGGSEVQLVESGGGLVQPGGSLRLSCAASGETFVDHDMDWVRQAPGKGLEWVGRTRNKLGSYTTEYAASVKGRETGRDDSKNSLYLQMNSLKTEDTAVYYCAREPKYWIDFDLWGRGTLVTVSS

SEQ ID NO: 421 - protein, 437 aa, synthetic construct
MAQKRPACTLKPECVQQLLVCSQEAKKSAYCPYSHFPVGAALLTQEGRIFKGCNIENACYPLGICAERTAIQKAVSEGYKDFRAIAIASDMQDDFISPCGACRQVMREFGTNWPVYMTKPDGTYIVMTVQELLPSSFGPEDLQKTQGGGGSGGGGSGGGGSGGGGSGGGGSGGGGSGGGGSGGGGSGGGGSEVQLLESGGGLVQPGGSLRLSCAASGETFSNYAMSWVRQAPGKGLEWVSAISGSGGSTYYADSVKGRFTISRDNSKNTLYLQMNSLRAEDTAVYYCAKGPPTYHTNYYYMDVWGKGTTVTVSSGGGGSGGGGSGGGGSDIQMTQSPSSVSASVGDRVTITCRASQGISSWLAWYQQKPGKAPKLLLIYAASSLQSGVPSRFSGSGSGTDFTLTISSLQPEDFATYYCQQTNSFPYTFGGGTKVEIK

SEQ ID NO: 422 - protein, 437 aa, synthetic construct
MAQKRPACTLKPECVQQLLVCSQEAKKSAYCPYSHFPVGAALLTQEGRIFKGCNIENACYPLGICAERTAIQKAVSEGYKDFRAIAIASDMQDDFISPCGACRQVMREFGTNWPVYMTKPDGTYIVMTVQELLPSSFGPEDLQKTQGGGGSGGGGSGGGGSGGGGSGGGGSGGGGSGGGGSGGGGSGGGGSEVQLLESGGGLVQPGGSLRLSCAASGETESSYVMIWVRQAPGKGLEWVSSISGDSVTTYYADSVKGRFTISRDNSKNTLYLOMNSLRAEDTAVYYCAKGPPTYHTNYYYMDVWGKGTTVTVSSGGGGSGGGGSGGGGSDIQMTQSPSSVSASVGDRVTITCRASQGISSWLAWYQQKPGKAPKLLIYAASSLOQSGVPSRFSGSGSGTDFTLTISSLQPEDFATYYCQQTNSEPYTFGGGTKVEIK

SEQ ID NO: 423 - protein, 456 aa, synthetic construct
MAQKRPACTLKPECVQQLLVCSQEAKKSAYCPYSHFPVGAALLTQEGRIFKGCNIENACYPLGICAERTAIQKAVSEGYKDFRAIAIASDMQDDFISPCGACRQVMREFGTNWPVYMTKPDGTYIVMTVQELLPSSFGPEDLQKTQGGGGSGGGGSGGGGSGGGGSGGGGSGGGGSGGGGSGGGGSGGGGSEVQLVESGGGLVQPGGSLRLSCAASGETFSDHYMDWVRQAPGKGLASGETFSDHYMDWVRQAPGKGLEWVGRIRNKASSYTTEYAASVKGRFTISRDDSKNSLYLQMNSLKTEDTAVYYCAREPKYWIDFDLWGRGTLVTVSSGGGGSGGGGSGGGGSDIQMTQSPSSLSASVGDRVTITCRASQSISSYLNWYQQKPGKAPKLLIYAASSLQSGVPSRFSGSGSGTDFTLTISSLQPEDFATYYCQQSYIAPYTFGGGTKVEIK

SEQ ID NO: 424 - protein, 433 aa, synthetic construct
MAQKRPACTLKPECVQQLLVCSQEAKKSAYCPYSHFPVGAALLTQEGRIFKGCNIENACYPLGICAERTAIQKAVSEGYKDFRAIAIASDMQDDFISPCGACRQVMREFGTNWPVYMTKPDGTYIVMTVQELLPSSFGPEDLQKTQGGGGSGGGGSGGGGSGGGGSGGGGSGGGGSGGGGSGGGGSGGGGSEVQLVESGGGLVQPGRSLRLSCTASGFTFSDHDMNWVRQAPGKGLEWVGRTRNAAGSYTTEYAASVKGRFTISRDDSKNSLYLQMNSLKTEDTAVYYCAREPKYWIDFDLWGRGTLVTSSGGGGSGGGGSGGGGSDIQMTQSPSSLSASVGDRVTITCRASQSISSYLNWYQQKPGKAPKLLIYAASSLQSGVPSRFSGSGSGTDFTLTISSLQPEDFATYYCQQSYIAPYTFGGGTKVEIK

SEQ ID NO: 425 - protein, 433 aa, synthetic construct
MAQKRPACTLKPECVQQLLVCSQEAKKSAYCPYSHFPVGAALLTQEGRIFKGCNIENACYPLGICAERTAIQKAVSEGYKDFRAIAIASDMQDDFISPCGACRQVMREFGTNWPVYMTKPDGTYIVMTVQELLPSSFGPEDLQKTQGGGGSGGGGSGGGGSGGGGSGGGGSGGGGSGGGGSGGGGSGGGGSDIQMTQSPSSLSASVGDRVTITCRASQSISSYLNWYQQKPGKAPKLLIYAASSLQSGVPSRFSGSGSGTDFTLTISSLQPEDFATYYCQQSYIAPYIFGGGTKVEIKGGGGSGGGGSGGGGSEVQLVESGGGLVQPGGSLRLSCAASGETFVDHDMDWVRQAPGKGLEWVGRTRNKLGSYTTEYAASVKGRETGRDDSKNSLYLQMNSLKTEDTAVYYCAREPKYWIDFDLWGRGTLVTVSS

SEQ ID NO: 426 - protein, 442 aa, synthetic construct
MAQKRPACTLKPECVQQLLVCSQEAKKSAYCPYSHFPVGAALLTQEGRIFKGCNIENACYPLGICAERTAIQKAVSEGYKDFRAIAIASDMQDDFISPCGACRQVMREFGTNWPVYMTKPDGTYIVMTVQELLPSSFGPEDLQKTQGGGGSGGGGSGGGGSGGGGSGGGGSGGGGSGGGGSGGGGSGGGGSGGGGSEVQLLESGGGLVQPGGSLRLSCAASGETFSNYAMSWVRQAPGKGLEWVSAISGSGGSTYYADSVKGRFTISRDNSKNTLYLQMNSLRAEDTAVYYCAKGPPTYHTNYYYMDVWGKGTTVTVSSGGGGSGGGGSGGGGSDIQMTQSPSSVSASVGDRVTITCRASQGISSWLAWYQQKPGKAPKLLLIYAASSLQSGVPSRFSGSGSGTDFTLTISSLQPEDFATYYCQQTNSFPYTFGGGTKVEIK

SEQ ID NO: 427 - protein, 442 aa, synthetic construct
MAQKRPACTLKPECVQQLLVCSQEAKKSAYCPYSHFPVGAALLTQEGRIFKGCNIENACYPLGICAERTAIQKAVSEGYKDFRAIAIASDMQDDFISPCGACRQVMREFGTNWPVYMTKPDGTYIVMTVQELLPSSFGPEDLQKTQGGGGSGGGGSGGGGSGGGGSGGGGSGGGGSGGGGSGGGGSGGGGSGGGGSEVQLLESGGGLVQPGGSLRLSCAASGETESSYVMIWVRQAPGKGLEWVSSISGDSVTTYYADSVKGRFTISRDNSKNTLYLOMNSLRAEDTAVYYCAKGPPTYHTNYYYMDVWGKGTTVTVSSGGGGSGGGGSGGGGSDIQMTQSPSSVSASVGDRVTITCRASQGISSWLAWYQQKPGKAPKLLIYAASSLOQSGVPSRFSGSGSGTDFTLTISSLQPEDFATYYCQQTNSEPYTFGGGTKVEIK

SEQ ID NO: 428 - protein, 461 aa, synthetic construct
MAQKRPACTLKPECVQQLLVCSQEAKKSAYCPYSHFPVGAALLTQEGRIFKGCNIENACYPLGICAERTAIQKAVSEGYKDFRAIAIASDMQDDFISPCGACRQVMREFGTNWPVYMTKPDGTYIVMTVQELLPSSFGPEDLQKTQGGGGSGGGGSGGGGSGGGGSGGGGSGGGGSGGGGSGGGGSGGGGSGGGGSEVQLVESGGGLVQPGGSLRLSCAASGETFSDHYMDWVRQAPGKGLASGETFSDHYMDWVRQAPGKGLEWVGRIRNKASSYTTEYAASVKGRFTISRDDSKNSLYLQMNSLKTEDTAVYYCAREPKYWIDFDLWGRGTLVTVSSGGGGSGGGGSGGGGSDIQMTQSPSSLSASVGDRVTITCRASQSISSYLNWYQQKPGKAPKLLIYAASSLQSGVPSRFSGSGSGTDFTLTISSLQPEDFATYYCQQSYIAPYTFGGGTKVEIK

SEQ ID NO: 429 - protein, 438 aa, synthetic construct
MAQKRPACTLKPECVQQLLVCSQEAKKSAYCPYSHFPVGAALLTQEGRIFKGCNIENACYPLGICAERTAIQKAVSEGYKDFRAIAIASDMQDDFISPCGACRQVMREFGTNWPVYMTKPDGTYIVMTVQELLPSSFGPEDLQKTQGGGGSGGGGSGGGGSGGGGSGGGGSGGGGSGGGGSGGGGSGGGGSGGGGSEVQLVESGGGLVQPGRSLRLSCTASGFTFSDHDMNWVRQAPGKGLEWVGRTRNAAGSYTTEYAASVKGRFTISRDDSKNSLYLQMNSLKTEDTAVYYCAREPKYWIDFDLWGRGTLVTSSGGGGSGGGGSGGGGSDIQMTQSPSSLSASVGDRVTITCRASQSISSYLNWYQQKPGKAPKLLIYAASSLQSGVPSRFSGSGSGTDFTLTISSLQPEDFATYYCQQSYIAPYTFGGGTKVEIK

SEQ ID NO: 430 - protein, 438 aa, synthetic construct
MAQKRPACTLKPECVQQLLVCSQEAKKSAYCPYSHFPVGAALLTQEGRIFKGCNIENACYPLGICAERTAIQKAVSEGYKDFRAIAIASDMQDDFISPCGACRQVMREFGTNWPVYMTKPDGTYIVMTVQELLPSSFGPEDLQKTQGGGGSGGGGSGGGGSGGGGSGGGGSGGGGSGGGGSGGGGSGGGGSGGGGSDIQMTQSPSSLSASVGDRVTITCRASQSISSYLNWYQQKPGKAPKLLIYAASSLQSGVPSRFSGSGSGTDFTLTISSLQPEDFATYYCQQSYIAPYIFGGGTKVEIKGGGGSGGGGSGGGGSEVQLVESGGGLVQPGGSLRLSCAASGETFVDHDMDWVRQAPGKGLEWVGRTRNKLGSYTTEYAASVKGRETGRDDSKNSLYLQMNSLKTEDTAVYYCAREPKYWIDFDLWGRGTLVTVSS

SEQ ID NO: 431 - protein, 447 aa, synthetic construct
MAQKRPACTLKPECVQQLLVCSQEAKKSAYCPYSHFPVGAALLTQEGRIFKGCNIENACYPLGICAERTAIQKAVSEGYKDFRAIAIASDMQDDFISPCGACRQVMREFGTNWPVYMTKPDGTYIVMTVQELLPSSFGPEDLQKTQGGGGSGGGGSGGGGSGGGGSGGGGSGGGGSGGGGSGGGGSGGGGSGGGGSGGGGSEVQLLESGGGLVQPGGSLRLSCAASGETFSNYAMSWVRQAPGKGLEWVSAISGSGGSTYYADSVKGRFTISRDNSKNTLYLQMNSLRAEDTAVYYCAKGPPTYHTNYYYMDVWGKGTTVTVSSGGGGSGGGGSGGGGSDIQMTQSPSSVSASVGDRVTITCRASQGISSWLAWYQQKPGKAPKLLLIYAASSLQSGVPSRFSGSGSGTDFTLTISSLQPEDFATYYCQQTNSFPYTFGGGTKVEIK

SEQ ID NO: 432 - protein, 447 aa, synthetic construct
MAQKRPACTLKPECVQQLLVCSQEAKKSAYCPYSHFPVGAALLTQEGRIFKGCNIENACYPLGICAERTAIQKAVSEGYKDFRAIAIASDMQDDFISPCGACRQVMREFGTNWPVYMTKPDGTYIVMTVQELLPSSFGPEDLQKTQGGGGSGGGGSGGGGSGGGGSGGGGSGGGGSGGGGSGGGGSGGGGSGGGGSGGGGSEVQLLESGGGLVQPGGSLRLSCAASGETESSYVMIWVRQAPGKGLEWVSSISGDSVTTYYADSVKGRFTISRDNSKNTLYLOMNSLRAEDTAVYYCAKGPPTYHTNYYYMDVWGKGTTVTVSSGGGGSGGGGSGGGGSDIQMTQSPSSVSASVGDRVTITCRASQGISSWLAWYQQKPGKAPKLLIYAASSLOQSGVPSRFSGSGSGTDFTLTISSLQPEDFATYYCQQTNSEPYTFGGGTKVEIK

SEQ ID NO: 433 - protein, 466 aa, synthetic construct
MAQKRPACTLKPECVQQLLVCSQEAKKSAYCPYSHFPVGAALLTQEGRIFKGCNIENACYPLGICAERTAIQKAVSEGYKDFRAIAIASDMQDDFISPCGACRQVMREFGTNWPVYMTKPDGTYIVMTVQELLPSSFGPEDLQKTQGGGGSGGGGSGGGGSGGGGSGGGGSGGGGSGGGGSGGGGSGGGGSGGGGSGGGGSEVQLVESGGGLVQPGGSLRLSCAASGETFSDHYMDWVRQAPGKGLASGETFSDHYMDWVRQAPGKGLEWVGRIRNKASSYTTEYAASVKGRFTISRDDSKNSLYLQMNSLKTEDTAVYYCAREPKYWIDFDLWGRGTLVTVSSGGGGSGGGGSGGGGSDIQMTQSPSSLSASVGDRVTITCRASQSISSYLNWYQQKPGKAPKLLIYAASSLQSGVPSRFSGSGSGTDFTLTISSLQPEDFATYYCQQSYIAPYTFGGGTKVEIK

SEQ ID NO: 434 - protein, 443 aa, synthetic construct
MAQKRPACTLKPECVQQLLVCSQEAKKSAYCPYSHFPVGAALLTQEGRIFKGCNIENACYPLGICAERTAIQKAVSEGYKDFRAIAIASDMQDDFISPCGACRQVMREFGTNWPVYMTKPDGTYIVMTVQELLPSSFGPEDLQKTQGGGGSGGGGSGGGGSGGGGSGGGGSGGGGSGGGGSGGGGSGGGGSGGGGSGGGGSEVQLVESGGGLVQPGRSLRLSCTASGFTFSDHDMNWVRQAPGKGLEWVGRTRNAAGSYTTEYAASVKGRFTISRDDSKNSLYLQMNSLKTEDTAVYYCAREPKYWIDFDLWGRGTLVTSSGGGGSGGGGSGGGGSDIQMTQSPSSLSASVGDRVTITCRASQSISSYLNWYQQKPGKAPKLLIYAASSLQSGVPSRFSGSGSGTDFTLTISSLQPEDFATYYCQQSYIAPYTFGGGTKVEIK

SEQ ID NO: 435 - protein, 443 aa, synthetic construct
MAQKRPACTLKPECVQQLLVCSQEAKKSAYCPYSHFPVGAALLTQEGRIFKGCNIENACYPLGICAERTAIQKAVSEGYKDFRAIAIASDMQDDFISPCGACRQVMREFGTNWPVYMTKPDGTYIVMTVQELLPSSFGPEDLQKTQGGGGSGGGGSGGGGSGGGGSGGGGSGGGGSGGGGSGGGGSGGGGSGGGGSGGGGSDIQMTQSPSSLSASVGDRVTITCRASQSISSYLNWYQQKPGKAPKLLIYAASSLQSGVPSRFSGSGSGTDFTLTISSLQPEDFATYYCQQSYIAPYIFGGGTKVEIKGGGGSGGGGSGGGGSEVQLVESGGGLVQPGGSLRLSCAASGETFVDHDMDWVRQAPGKGLEWVGRTRNKLGSYTTEYAASVKGRETGRDDSKNSLYLQMNSLKTEDTAVYYCAREPKYWIDFDLWGRGTLVTVSS

SEQ ID NO: 436 - protein, 452 aa, synthetic construct
MAQKRPACTLKPECVQQLLVCSQEAKKSAYCPYSHFPVGAALLTQEGRIFKGCNIENACYPLGICAERTAIQKAVSEGYKDFRAIAIASDMQDDFISPCGACRQVMREFGTNWPVYMTKPDGTYIVMTVQELLPSSFGPEDLQKTQGGGGSGGGGSGGGGSGGGGSGGGGSGGGGSGGGGSGGGGSGGGGSGGGGSGGGGSGGGGSEVQLLESGGGLVQPGGSLRLSCAASGETFSNYAMSWVRQAPGKGLEWVSAISGSGGSTYYADSVKGRFTISRDNSKNTLYLQMNSLRAEDTAVYYCAKGPPTYHTNYYYMDVWGKGTTVTVSSGGGGSGGGGSGGGGSDIQMTQSPSSVSASVGDRVTITCRASQGISSWLAWYQQKPGKAPKLLLIYAASSLQSGVPSRFSGSGSGTDFTLTISSLQPEDFATYYCQQTNSFPYTFGGGTKVEIK

SEQ ID NO: 437 - protein, 452 aa, synthetic construct
MAQKRPACTLKPECVQQLLVCSQEAKKSAYCPYSHFPVGAALLTQEGRIFKGCNIENACYPLGICAERTAIQKAVSEGYKDFRAIAIASDMQDDFISPCGACRQVMREFGTNWPVYMTKPDGTYIVMTVQELLPSSFGPEDLQKTQGGGGSGGGGSGGGGSGGGGSGGGGSGGGGSGGGGSGGGGSGGGGSGGGGSGGGGSGGGGSEVQLLESGGGLVQPGGSLRLSCAASGETESSYVMIWVRQAPGKGLEWVSSISGDSVTTYYADSVKGRFTISRDNSKNTLYLOMNSLRAEDTAVYYCAKGPPTYHTNYYYMDVWGKGTTVTVSSGGGGSGGGGSGGGGSDIQMTQSPSSVSASVGDRVTITCRASQGISSWLAWYQQKPGKAPKLLIYAASSLOQSGVPSRFSGSGSGTDFTLTISSLQPEDFATYYCQQTNSEPYTFGGGTKVEIK

SEQ ID NO: 438 - protein, 471 aa, synthetic construct
MAQKRPACTLKPECVQQLLVCSQEAKKSAYCPYSHFPVGAALLTQEGRIFKGCNIENACYPLGICAERTAIQKAVSEGYKDFRAIAIASDMQDDFISPCGACRQVMREFGTNWPVYMTKPDGTYIVMTVQELLPSSFGPEDLQKTQGGGGSGGGGSGGGGSGGGGSGGGGSGGGGSGGGGSGGGGSGGGGSGGGGSGGGGSGGGGSEVQLVESGGGLVQPGGSLRLSCAASGETFSDHYMDWVRQAPGKGLASGETFSDHYMDWVRQAPGKGLEWVGRIRNKASSYTTEYAASVKGRFTISRDDSKNSLYLQMNSLKTEDTAVYYCAREPKYWIDFDLWGRGTLVTVSSGGGGSGGGGSGGGGSDIQMTQSPSSLSASVGDRVTITCRASQSISSYLNWYQQKPGKAPKLLIYAASSLQSGVPSRFSGSGSGTDFTLTISSLQPEDFATYYCQQSYIAPYTFGGGTKVEIK

SEQ ID NO: 439 - protein, 448 aa, synthetic construct
MAQKRPACTLKPECVQQLLVCSQEAKKSAYCPYSHFPVGAALLTQEGRIFKGCNIENACYPLGICAERTAIQKAVSEGYKDFRAIAIASDMQDDFISPCGACRQVMREFGTNWPVYMTKPDGTYIVMTVQELLPSSFGPEDLQKTQGGGGSGGGGSGGGGSGGGGSGGGGSGGGGSGGGGSGGGGSGGGGSGGGGSGGGGSGGGGSEVQLVESGGGLVQPGRSLRLSCTASGFTFSDHDMNWVRQAPGKGLEWVGRTRNAAGSYTTEYAASVKGRFTISRDDSKNSLYLQMNSLKTEDTAVYYCAREPKYWIDFDLWGRGTLVTSSGGGGSGGGGSGGGGSDIQMTQSPSSLSASVGDRVTITCRASQSISSYLNWYQQKPGKAPKLLIYAASSLQSGVPSRFSGSGSGTDFTLTISSLQPEDFATYYCQQSYIAPYTFGGGTKVEIK

SEQ ID NO: 440 - protein, 448 aa, synthetic construct
MAQKRPACTLKPECVQQLLVCSQEAKKSAYCPYSHFPVGAALLTQEGRIFKGCNIENACYPLGICAERTAIQKAVSEGYKDFRAIAIASDMQDDFISPCGACRQVMREFGTNWPVYMTKPDGTYIVMTVQELLPSSFGPEDLQKTQGGGGSGGGGSGGGGSGGGGSGGGGSGGGGSGGGGSGGGGSGGGGSGGGGSGGGGSGGGGSDIQMTQSPSSLSASVGDRVTITCRASQSISSYLNWYQQKPGKAPKLLIYAASSLQSGVPSRFSGSGSGTDFTLTISSLQPEDFATYYCQQSYIAPYIFGGGTKVEIKGGGGSGGGGSGGGGSEVQLVESGGGLVQPGGSLRLSCAASGETFVDHDMDWVRQAPGKGLEWVGRTRNKLGSYTTEYAASVKGRETGRDDSKNSLYLQMNSLKTEDTAVYYCAREPKYWIDFDLWGRGTLVTVSS

SEQ ID NO: 441 - protein, 108 aa, synthetic construct
DIQMTQSPSSVSASVGDRVTITCRASQGISSWLAWYQQKPGKAPKLLLIYAASSLQSGVPSRFSGSGSGTDFTLTISSLQPEDFATYYCQQTNSFPYTFGGGTKVEIK

SEQ ID NO: 442 - protein, 123 aa, synthetic construct
EVQLLESGGGLVQPGGSLRLSCAASGETFSNYAMSWVRQAPGKGLEWVSAISGSGGSTYYADSVKGRFTISRDNSKNTLYLQMNSLRAEDTAVYYCAKGPPTYHTNYYYMDVWGKGTTVTVSS

SEQ ID NO: 443 - protein, 108 aa, synthetic construct
DIQMTQSPSSVSASVGDRVTITCRASQGISSWLAWYQQKPGKAPKLLIYAASSLOQSGVPSRFSGSGSGTDFTLTISSLQPEDFATYYCQQTNSEPYTFGGGTKVEIK

SEQ ID NO: 444 - protein, 123 aa, synthetic construct
EVQLLESGGGLVQPGGSLRLSCAASGETESSYVMIWVRQAPGKGLEWVSSISGDSVTTYYADSVKGRFTISRDNSKNTLYLOMNSLRAEDTAVYYCAKGPPTYHTNYYYMDVWGKGTTVTVSS

SEQ ID NO: 445 - protein, 107 aa, synthetic construct
DIQMTQSPSSLSASVGDRVTITCRASQSISSYLNWYQQKPGKAPKLLIYAASSLQSGVPSRFSGSGSGTDFTLTISSLQPEDFATYYCQQSYIAPYTFGGGTKVEIK

SEQ ID NO: 446 - protein, 143 aa, synthetic construct
EVQLVESGGGLVQPGGSLRLSCAASGETFSDHYMDWVRQAPGKGLASGETFSDHYMDWVRQAPGKGLEWVGRIRNKASSYTTEYAASVKGRFTISRDDSKNSLYLQMNSLKTEDTAVYYCAREPKYWIDFDLWGRGTLVTVSS

SEQ ID NO: 447 - protein, 107 aa, synthetic construct; identical to SEQ ID NO: 445

SEQ ID NO: 448 - protein, 120 aa, synthetic construct
EVQLVESGGGLVQPGRSLRLSCTASGFTFSDHDMNWVRQAPGKGLEWVGRTRNAAGSYTTEYAASVKGRFTISRDDSKNSLYLQMNSLKTEDTAVYYCAREPKYWIDFDLWGRGTLVTSS

SEQ ID NO: 449 - protein, 120 aa, synthetic construct
EVQLVESGGGLVQPGGSLRLSCAASGETFVDHDMDWVRQAPGKGLEWVGRTRNKLGSYTTEYAASVKGRETGRDDSKNSLYLQMNSLKTEDTAVYYCAREPKYWIDFDLWGRGTLVTVSS

SEQ ID NO: 450 - protein, 107 aa, synthetic construct
DIQMTQSPSSLSASVGDRVTITCRASQSISSYLNWYQQKPGKAPKLLIYAASSLQSGVPSRFSGSGSGTDFTLTISSLQPEDFATYYCQQSYIAPYIFGGGTKVEIK

SEQ ID NO: 451 - DNA, 321 bp, synthetic construct
  source 1..321: mol_type = other DNA
gacatccagatgacccagtctccatcttccgtgtctgcatctgtaggagacagagtcaccatcacttgtcgggcgagtcagggtattagcagctggttagcctggtatcagcagaaaccagggaaagcccctaagctcctgatctatgctgcatccagtttgcaaagtggggtcccatcaaggttcagcggcagtggatctgggacagatttcactctcaccatcagcagcctgcagcctgaagattttgcaacttattactgtcagcaaacaaatagtttcccttacacttttggcggagggaccaaggttgagatcaaa

SEQ ID NO: 452 - DNA, 369 bp, synthetic construct
  source 1..369: mol_type = other DNA
gaggtgcagctgttggagtctgggggaggcttggtacagcctggggggtccctgagactctcctgtgcagcctctggattcacctttagcaattatgccatgagctgggtccgccaggctccagggaaggggctggagtgggtctcagctattagtggtagtggtggtagcacatactacgcagactccgtgaagggccggttcaccatctccagagacaattccaagaacacgctgtatctgcaaatgaacagcctgagagccgaggacacggcggtgtactactgcgccaagggccctcctacataccacacaaactactactacatggacgtatggggcaagggtacaactgtcaccgtctcctca

SEQ ID NO: 453 - DNA, 321 bp, synthetic construct; identical to SEQ ID NO: 451
  source 1..321: mol_type = other DNA

SEQ ID NO: 454 - DNA, 369 bp, synthetic construct
  source 1..369: mol_type = other DNA
gaggtgcagctgttggagtctgggggaggcttggtacagcctggggggtccctgagactctcctgtgcagcctctggattcacctttagcagctatgtcatgatctgggtccgccaggctccagggaaggggctggagtgggtctcaagcattagtggtgacagcgtaacaacatactacgcagactccgtgaagggccggttcaccatctccagagacaattccaagaacacgctgtatctgcaaatgaacagcctgagagccgaggacacggcggtgtactactgcgccaagggccctcctacataccacacaaactactactacatggacgtatggggcaagggtacaactgtcaccgtctcctca

SEQ ID NO: 455 - DNA, 321 bp, synthetic construct
  source 1..321: mol_type = other DNA
gacatccagatgacccagtctccatcctccctgtctgcatctgtaggagacagagtcaccatcacttgccgggcaagtcagagcattagcagctatttaaattggtatcagcagaaaccagggaaagcccctaagctcctgatctatgctgcatccagtttgcaaagtggggtcccatcaaggttcagtggcagtggatctgggacagatttcactctcaccatcagcagtctgcaacctgaagattttgcaacttactactgtcagcaaagctacatcgccccttacacttttggcggagggaccaaggttgagatcaaa

SEQ ID NO: 456 - DNA, 363 bp, synthetic construct
  source 1..363: mol_type = other DNA
gaggtgcagctggtggagtctgggggaggcttggtccagcctggagggtccctgagactctcctgtgcagcctctggattcaccttcagtgaccactacatggactgggtccgccaggctccagggaaggggctggagtgggttggccgtactagaaacaaagctagtagttacaccacagaatacgccgcgtctgtgaaaggcagattcaccatctcaagagatgattcaaagaactcactgtatctgcaaatgaacagcctgaaaaccgaggacacggcggtgtactactgcgccagagagcctaaatactggatcgacttcgacctatgggggagaggtaccttggtcaccgtctcctca

SEQ ID NO: 457 - DNA, 321 bp, synthetic construct; identical to SEQ ID NO: 455
  source 1..321: mol_type = other DNA

SEQ ID NO: 458 - DNA, 336 bp, synthetic construct
  source 1..336: mol_type = other DNA
gaggtgcagctggtggagtctgggggaggcttggtacagccagggcggtccctgagactctcctgtacagcttctggattcaccttcagtgaccacgacatgaactgggtccgccaggctccagggaaggggctggagtgggttggccgtactagaaacgccgctggaagttacaccacagaatacgccgcgtctgtgaaaggcagattcaccatctcaagagatgattcaaagaactcactgtatctgcaaatgaacagcctgaaaaccgaggacacggcggtgtactactgcgccagagagcctaaatactggatcgacttcgacctatggggg

SEQ ID NO: 459 - DNA, 363 bp, synthetic construct
  source 1..363: mol_type = other DNA
gaggtgcagctggtggagtctgggggaggcttggtccagcctggagggtccctgagactctcctgtgcagcctctggattcaccttcgtagaccacgacatggactgggtccgccaggctccagggaaggggctggagtgggttggccgtactagaaacaaactaggaagttacaccacagaatacgccgcgtctgtgaaaggcagattcaccatctcaagagatgattcaaagaactcactgtatctgcaaatgaacagcctgaaaaccgaggacacggcggtgtactactgcgccagagagcctaaatactggatcgacttcgacctatgggggagaggtaccttggtcaccgtctcctca

SEQ ID NO: 460 - DNA, 321 bp, synthetic construct
  source 1..321: mol_type = other DNA
gacatccagatgacccagtctccatcctccctgtctgcatctgtaggagacagagtcaccatcacttgccgggcaagtcagagcattagcagctatttaaattggtatcagcagaaaccagggaaagcccctaagctcctgatctatgctgcatccagtttgcaaagtggggtcccatcaaggttcagtggcagtggatgcggtacagatttcactctcaccatcagcagtctgcaacctgaagattttgcaacttactactgtcagcaaagctacatcgccccttacacttttggcggagggaccaaggttgagatcaaa

SEQ ID NO: 461 - protein, 5 aa, synthetic construct
GGGGS

SEQ ID NO: 462 - protein, 15 aa, synthetic construct
GGGGSGGGGSGGGGS

SEQ ID NO: 463 - protein, 20 aa, synthetic construct
GGGGSGGGGSGGGGSGGGGS

SEQ ID NO: 464 - protein, 25 aa, synthetic construct
GGGGSGGGGSGGGGSGGGGSGGGGS

SEQ ID NO: 465 - protein, 30 aa, synthetic construct
GGGGSGGGGSGGGGSGGGGSGGGGSGGGGS

SEQ ID NO: 466 - protein, 35 aa, synthetic construct
GGGGSGGGGSGGGGSGGGGSGGGGSGGGGSGGGGS

SEQ ID NO: 467 - protein, 40 aa, synthetic construct
GGGGSGGGGSGGGGSGGGGSGGGGSGGGGSGGGGSGGGGS

SEQ ID NO: 468 - protein, 45 aa, synthetic construct
GGGGSGGGGSGGGGSGGGGSGGGGSGGGGSGGGGSGGGGSGGGGS

SEQ ID NO: 469 - protein, 50 aa, synthetic construct
GGGGSGGGGSGGGGSGGGGSGGGGSGGGGSGGGGSGGGGSGGGGSGGGGS

SEQ ID NO: 470 - protein, 55 aa, synthetic construct
GGGGSGGGGSGGGGSGGGGSGGGGSGGGGSGGGGSGGGGSGGGGSGGGGSGGGGS

SEQ ID NO: 471 - protein, 60 aa, synthetic construct
GGGGSGGGGSGGGGSGGGGSGGGGSGGGGSGGGGSGGGGSGGGGSGGGGSGGGGSGGGGS

SEQ ID NO: 472 - DNA, 15 bp, synthetic construct
  source 1..15: mol_type = other DNA
ggtggcgggggatca

SEQ ID NO: 473 - DNA, 45 bp, synthetic construct
  source 1..45: mol_type = other DNA
ggagggggcggatcaggcggaggtggatcgggagggggtggtagc

SEQ ID NO: 474 - DNA, 60 bp, synthetic construct
  source 1..60: mol_type = other DNA
ggtggaggcggttcgggtggagggggatctggtggcggaggtagcggtggcgggggatca

SEQ ID NO: 475 - DNA, 75 bp, synthetic construct
  source 1..75: mol_type = other DNA
ggtggaggcggttcgggtggagggggatctggtggcggaggtagcggtggcgggggatcaggtggcgggggatca

SEQ ID NO: 476 - DNA, 90 bp, synthetic construct
  source 1..90: mol_type = other DNA
ggtggaggcggttcgggtggagggggatctggtggcggaggtagcggtggcgggggatcaggtggcgggggatcaggtggcgggggatca

SEQ ID NO: 477 - DNA, 105 bp, synthetic construct
  source 1..105: mol_type = other DNA
ggtggaggcggttcgggtggagggggatctggtggcggaggtagcggtggcgggggatcaggtggcgggggatcaggtggcgggggatcaggtggcgggggatca

SEQ ID NO: 478 - DNA, 120 bp, synthetic construct
  source 1..120: mol_type = other DNA
ggtggaggcggttcgggtggagggggatctggtggcggaggtagcggtggcgggggatcaggtggcgggggatcaggtggcgggggatcaggtggcgggggatcaggtggcgggggatca

SEQ ID NO: 479 - DNA, 135 bp, synthetic construct
  source 1..135: mol_type = other DNA
ggtggaggcggttcgggtggagggggatctggtggcggaggtagcggtggcgggggatcaggtggcgggggatcaggtggcgggggatcaggtggcgggggatcaggtggcgggggatcaggtggcgggggatca

SEQ ID NO: 480 - DNA, 150 bp, synthetic construct
  source 1..150: mol_type = other DNA
ggtggaggcggttcgggtggagggggatctggtggcggaggtagcggtggcgggggatcaggtggcgggggatcaggtggcgggggatcaggtggcgggggatcaggtggcgggggatcaggtggcgggggatcaggtggcgggggatca

SEQ ID NO: 481 - DNA, 165 bp, synthetic construct
  source 1..165: mol_type = other DNA
ggtggaggcggttcgggtggagggggatctggtggcggaggtagcggtggcgggggatcaggtggcgggggatcaggtggcgggggatcaggtggcgggggatcaggtggcgggggatcaggtggcgggggatcaggtggcgggggatcaggtggcgggggatca

SEQ ID NO: 482 - DNA, 180 bp, synthetic construct
  source 1..180: mol_type = other DNA
ggtggaggcggttcgggtggagggggatctggtggcggaggtagcggtggcgggggatcaggtggcgggggatcaggtggcgggggatcaggtggcgggggatcaggtggcgggggatcaggtggcgggggatcaggtggcgggggatcaggtggcgggggatcaggtggcgggggatca

SEQ ID NO: 483 - protein, 146 aa, synthetic construct [sequence omitted]

SEQ ID NO: 484 - DNA, 408 bp, synthetic construct
  source 1..408: mol_type = other DNA
cccgctgctctgctgcctgcccggggtaccaacatggcccagaagcgtcctgcctgcaccctgaagcctgagtgtgtccagcagctgctggtttgctcccaggaggccaagaagtcagcctactgcccctacagtcactttcctgtgggggctgccctgctcacccaggaggggagaatcttcaaagggtgcaacatagaaaatgcctgctacccgctgggcatctgtgctgaacggaccgctatccagaaggccgtctcagaagggtacaaggatttcagggcaattgctatcgccagtgacatgcaagatgattttatctctccatgtggggcctgcaggcaagtcatgagagagtttggcaccaactggcccgtgtacatgaccaagccggatggtacgtatatt

SEQ ID NO: 485 - protein, 6 aa, synthetic construct
HHHHHH

SEQ ID NO: 486 - DNA, 18 bp, synthetic construct
  source 1..18: mol_type = other DNA
caccatcatcatcaccat

SEQ ID NO: 487 - DNA, 1176 bp, synthetic construct
  source 1..1176: mol_type = other DNA
gacatccagatgacccagtctccatcttccgtgtctgcatctgtaggagacagagtcaccatcacttgtcgggcgagtcagggtattagcagctggttagcctggtatcagcagaaaccagggaaagcccctaagctcctgatctatgctgcatccagtttgcaaagtggggtcccatcaaggttcagcggcagtggatctgggacagatttcactctcaccatcagcagcctgcagcctgaagattttgcaacttattactgtcagcaaacaaatagtttcccttacacttttggcggagggaccaaggttgagatcaaaggagggggcggatcaggcggaggtggatcgggagggggtggtagcgaggtgcagctgttggagtctgggggaggcttggtacagcctggggggtccctgagactctcctgtgcagcctctggattcacctttagcaattatgccatgagctgggtccgccaggctccagggaaggggctggagtgggtctcagctattagtggtagtggtggtagcacatactacgcagactccgtgaagggccggttcaccatctccagagacaattccaagaacacgctgtatctgcaaatgaacagcctgagagccgaggacacggcggtgtactactgcgccaagggccctcctacataccacacaaactactactacatggacgtatggggcaagggtacaactgtcaccgtctcctcaggtggcgggggatcacccgctgctctgctgcctgcccggggtaccaacatggcccagaagcgtcctgcctgcaccctgaagcctgagtgtgtccagcagctgctggtttgctcccaggaggccaagaagtcagcctactgcccctacagtcactttcctgtgggggctgccctgctcacccaggaggggagaatcttcaaagggtgcaacatagaaaatgcctgctacccgctgggcatctgtgctgaacggaccgctatccagaaggccgtctcagaagggtacaaggatttcagggcaattgctatcgccagtgacatgcaagatgattttatctctccatgtggggcctgcaggcaagtcatgagagagtttggcaccaactggcccgtgtacatgaccaagccggatggtacgtatattcaccatcatcatcaccat

SEQ ID NO: 488 - DNA, 1206 bp, synthetic construct
  source 1..1206: mol_type = other DNA
gacatccagatgacccagtctccatcttccgtgtctgcatctgtaggagacagagtcaccatcacttgtcgggcgagtcagggtattagcagctggttagcctggtatcagcagaaaccagggaaagcccctaagctcctgatctatgctgcatccagtttgcaaagtggggtcccatcaaggttcagcggcagtggatctgggacagatttcactctcaccatcagcagcctgcagcctgaagattttgcaacttattactgtcagcaaacaaatagtttcccttacacttttggcggagggaccaaggttgagatcaaaggagggggcggatcaggcggaggtggatcgggagggggtggtagcgaggtgcagctgttggagtctgggggaggcttggtacagcctggggggtccctgagactctcctgtgcagcctctggattcacctttagcaattatgccatgagctgggtccgccaggctccagggaaggggctggagtgggtctcagctattagtggtagtggtggtagcacatactacgcagactccgtgaagggccggttcaccatctccagagacaattccaagaacacgctgtatctgcaaatgaacagcctgagagccgaggacacggcggtgtactactgcgccaagggccctcctacataccacacaaactactactacatggacgtatggggcaagggtacaactgtcaccgtctcctcaggagggggcggatcaggcggaggtggatcgggagggggtggtagccccgctgctctgctgcctgcccggggtaccaacatggcccagaagcgtcctgcctgcaccctgaagcctgagtgtgtccagcagctgctggtttgctcccaggaggccaagaagtcagcctactgcccctacagtcactttcctgtgggggctgccctgctcacccaggaggggagaatcttcaaagggtgcaacatagaaaatgcctgctacccgctgggcatctgtgctgaacggaccgctatccagaaggccgtctcagaagggtacaaggatttcagggcaattgctatcgccagtgacatgcaagatgattttatctctccatgtggggcctgcaggcaagtcatgagagagtttggcaccaactggcccgtgtacatgaccaagccggatggtacgtatattcaccatcatcatcaccat

SEQ ID NO: 489 - DNA, 1221 bp, synthetic construct
  source 1..1221: mol_type = other DNA
gacatccagatgacccagtctccatcttccgtgtctgcatctgtaggagacagagtcaccatcacttgtcgggcgagtcagggtattagcagctggttagcctggtatcagcagaaaccagggaaagcccctaagctcctgatctatgctgcatccagtttgcaaagtggggtcccatcaaggttcagcggcagtggatctgggacagatttcactctcaccatcagcagcctgcagcctgaagattttgcaacttattactgtcagcaaacaaatagtttcccttacacttttggcggagggaccaaggttgagatcaaaggagggggcggatcaggcggaggtggatcgggagggggtggtagcgaggtgcagctgttggagtctgggggaggcttggtacagcctggggggtccctgagactctcctgtgcagcctctggattcacctttagcaattatgccatgagctgggtccgccaggctccagggaaggggctggagtgggtctcagctattagtggtagtggtggtagcacatactacgcagactccgtgaagggccggttcaccatctccagagacaattccaagaacacgctgtatctgcaaatgaacagcctgagagccgaggacacggcggtgtactactgcgccaagggccctcctacataccacacaaactactactacatggacgtatggggcaagggtacaactgtcaccgtctcctcaggtggaggcggttcgggtggagggggatctggtggcggaggtagcggtggcgggggatcacccgctgctctgctgcctgcccggggtaccaacatggcccagaagcgtcctgcctgcaccctgaagcctgagtgtgtccagcagctgctggtttgctcccaggaggccaagaagtcagcctactgcccctacagtcactttcctgtgggggctgccctgctcacccaggaggggagaatcttcaaagggtgcaacatagaaaatgcctgctacccgctgggcatctgtgctgaacggaccgctatccagaaggccgtctcagaagggtacaaggatttcagggcaattgctatcgccagtgacatgcaagatgattttatctctccatgtggggcctgcaggcaagtcatgagagagtttggcaccaactggcccgtgtacatgaccaagccggatggtacgtatattcaccatcatcatcaccat

SEQ ID NO: 490 - DNA, 1236 bp, synthetic construct
  source 1..1236: mol_type = other DNA
gacatccagatgacccagtctccatcttccgtgtctgcatctgtaggagacagagtcaccatcacttgtcgggcgagtcagggtattagcagctggttagcctggtatcagcagaaaccagggaaagcccctaagctcctgatctatgctgcatccagtttgcaaagtggggtcccatcaaggttcagcggcagtggatctgggacagatttcactctcaccatcagcagcctgcagcctgaagattttgcaacttattactgtcagcaaacaaatagtttcccttacacttttggcggagggaccaaggttgagatcaaaggagggggcggatcaggcggaggtggatcgggagggggtggtagcgaggtgcagctgttggagtctgggggaggcttggtacagcctggggggtccctgagactctcctgtgcagcctctggattcacctttagcaattatgccatgagctgggtccgccaggctccagggaaggggctggagtgggtctcagctattagtggtagtggtggtagcacatactacgcagactccgtgaagggccggttcaccatctccagagacaattccaagaacacgctgtatctgcaaatgaacagcctgagagccgaggacacggcggtgtactactgcgccaagggccctcctacataccacacaaactactactacatggacgtatggggcaagggtacaactgtcaccgtctcctcaggtggaggcggttcgggtggagggggatctggtggcggaggtagcggtggcgggggatcaggtggcgggggatcacccgctgctctgctgcctgcccggggtaccaacatggcccagaagcgtcctgcctgcaccctgaagcctgagtgtgtccagcagctgctggtttgctcccaggaggccaagaagtcagcctactgcccctacagtcactttcctgtgggggctgccctgctcacccaggaggggagaatcttcaaagggtgcaacatagaaaatgcctgctacccgctgggcatctgtgctgaacggaccgctatccagaaggccgtctcagaagggtacaaggatttcagggcaattgctatcgccagtgacatgcaagatgattttatctctccatgtggggcctgcaggcaagtcatgagagagtttggcaccaactggcccgtgtacatgaccaagccggatggtacgtatattcaccatcatcatcaccat

SEQ ID NO: 491 - DNA, 1251 bp, synthetic construct
  source 1..1251: mol_type = other DNA
gacatccagatgacccagtctccatcttccgtgtctgcatctgtaggagacagagtcaccatcacttgtcgggcgagtcagggtattagcagctggttagcctggtatcagcagaaaccagggaaagcccctaagctcctgatctatgctgcatccagtttgcaaagtggggtcccatcaaggttcagcggcagtggatctgggacagatttcactctcaccatcagcagcctgcagcctgaagattttgcaacttattactgtcagcaaacaaatagtttcccttacacttttggcggagggaccaaggttgagatcaaaggagggggcggatcaggcggaggtggatcgggagggggtggtagcgaggtgcagctgttggagtctgggggaggcttggtacagcctggggggtccctgagactctcctgtgcagcctctggattcacctttagcaattatgccatgagctgggtccgccaggctccagggaaggggctggagtgggtctcagctattagtggtagtggtggtagcacatactacgcagactccgtgaagggccggttcaccatctccagagacaattccaagaacacgctgtatctgcaaatgaacagcctgagagccgaggacacggcggtgtactactgcgccaagggccctcctacataccacacaaactactactacatggacgtatggggcaagggtacaactgtcaccgtctcctcaggtggaggcggttcgggtggagggggatctggtggcggaggtagcggtggcgggggatcaggtggcgggggatcaggtggcgggggatcacccgctgctctgctgcctgcccggggtaccaacatggcccagaagcgtcctgcctgcaccctgaagcctgagtgtgtccagcagctgctggtttgctcccaggaggccaagaagtcagcctactgcccctacagtcactttcctgtgggggctgccctgctcacccaggaggggagaatcttcaaagggtgcaacatagaaaatgcctgctacccgctgggcatctgtgctgaacggaccgctatccagaaggccgtctcagaagggtacaaggatttcagggcaattgctatcgccagtgacatgcaagatgattttatctctccatgtggggcctgcaggcaagtcatgagagagtttggcaccaactggcccgtgtacatgaccaagccggatggtacgtatattcaccatcatcatcaccat

SEQ ID NO: 492 - DNA, 1266 bp, synthetic construct
  source 1..1266: mol_type = other DNA
gacatccagatgacccagtctccatcttccgtgtctgcatctgtaggagacagagtcaccatcacttgtcgggcgagtcagggtattagcagctggttagcctggtatcagcagaaaccagggaaagcccctaagctcctgatctatgctgcatccagtttgcaaagtggggtcccatcaaggttcagcggcagtggatctgggacagatttcactctcaccatcagcagcctgcagcctgaagattttgcaacttattactgtcagcaaacaaatagtttcccttacacttttggcggagggaccaaggttgagatcaaaggagggggcggatcaggcggaggtggatcgggagggggtggtagcgaggtgcagctgttggagtctgggggaggcttggtacagcctggggggtccctgagactctcctgtgcagcctctggattcacctttagcaattatgccatgagctgggtccgccaggctccagggaaggggctggagtgggtctcagctattagtggtagtggtggtagcacatactacgcagactccgtgaagggccggttcaccatctccagagacaattccaagaacacgctgtatctgcaaatgaacagcctgagagccgaggacacggcggtgtactactgcgccaagggccctcctacataccacacaaactactactacatggacgtatggggcaagggtacaactgtcaccgtctcctcaggtggaggcggttcgggtggagggggatctggtggcggaggtagcggtggcgggggatcaggtggcgggggatcaggtggcgggggatcaggtggcgggggatcacccgctgctctgctgcctgcccggggtaccaacatggcccagaagcgtcctgcctgcaccctgaagcctgagtgtgtccagcagctgctggtttgctcccaggaggccaagaagtcagcctactgcccctacagtcactttcctgtgggggctgccctgctcacccaggaggggagaatcttcaaagggtgcaacatagaaaatgcctgctacccgctgggcatctgtgctgaacggaccgctatccagaaggccgtctcagaagggtacaaggatttcagggcaattgctatcgccagtgacatgcaagatgattttatctctccatgtggggcctgcaggcaagtcatgagagagtttggcaccaactggcccgtgtacatgaccaagccggatggtacgtatattcaccatcatcatcaccat

SEQ ID NO: 493 - DNA, 1281 bp, synthetic construct
  source 1..1281: mol_type = other DNA
gacatccagatgacccagtctccatcttccgtgtctgcatctgtaggagacagagtcaccatcacttgtcgggcgagtcagggtattagcagctggttagcctggtatcagcagaaaccagggaaagcccctaagctcctgatctatgctgcatccagtttgcaaagtggggtcccatcaaggttcagcggcagtggatctgggacagatttcactctcaccatcagcagcctgcagcctgaagattttgcaacttattactgtcagcaaacaaatagtttcccttacacttttggcggagggaccaaggttgagatcaaaggagggggcggatcaggcggaggtggatcgggagggggtggtagcgaggtgcagctgttggagtctgggggaggcttggtacagcctggggggtccctgagactctcctgtgcagcctctggattcacctttagcaattatgccatgagctgggtccgccaggctccagggaaggggctggagtgggtctcagctattagtggtagtggtggtagcacatactacgcagactccgtgaagggccggttcaccatctccagagacaattccaagaacacgctgtatctgcaaatgaacagcctgagagccgaggacacggcggtgtactactgcgccaagggccctcctacataccacacaaactactactacatggacgtatggggcaagggtacaactgtcaccgtctcctcaggtggaggcggttcgggtggagggggatctggtggcggaggtagcggtggcgggggatcaggtggcgggggatcaggtggcgggggatcaggtggcgggggatcaggtggcgggggatcacccgctgctctgctgcctgcccggggtaccaacatggcccagaagcgtcctgcctgcaccctgaagcctgagtgtgtccagcagctgctggtttgctcccaggaggccaagaagtcagcctactgcccctacagtcactttcctgtgggggctgccctgctcacccaggaggggagaatcttcaaagggtgcaacatagaaaatgcctgctacccgctgggcatctgtgctgaacggaccgctatccagaaggccgtctcagaagggtacaaggatttcagggcaattgctatcgccagtgacatgcaagatgattttatctctccatgtggggcctgcaggcaagtcatgagagagtttggcaccaactggcccgtgtacatgaccaagccggatggtacgtatattcaccatcatcatcaccat

SEQ ID NO: 494 - DNA, 1296 bp, synthetic construct
  source 1..1296: mol_type = other DNA
gacatccagatgacccagtctccatcttccgtgtctgcatctgtaggagacagagtcaccatcacttgtcgggcgagtcagggtattagcagctggttagcctggtatcagcagaaaccagggaaagcccctaagctcctgatctatgctgcatccagtttgcaaagtggggtcccatcaaggttcagcggcagtggatctgggacagatttcactctcaccatcagcagcctgcagcctgaagattttgcaacttattactgtcagcaaacaaatagtttcccttacacttttggcggagggaccaaggttgagatcaaaggagggggcggatcaggcggaggtggatcgggagggggtggtagcgaggtgcagctgttggagtctgggggaggcttggtacagcctggggggtccctgagactctcctgtgcagcctctggattcacctttagcaattatgccatgagctgggtccgccaggctccagggaaggggctggagtgggtctcagctattagtggtagtggtggtagcacatactacgcagactccgtgaagggccggttcaccatctccagagacaattccaagaacacgctgtatctgcaaatgaacagcctgagagccgaggacacggcggtgtactactgcgccaagggccctcctacataccacacaaactactactacatggacgtatggggcaagggtacaactgtcaccgtctcctcaggtggaggcggttcgggtggagggggatctggtggcggaggtagcggtggcgggggatcaggtggcgggggatcaggtggcgggggatcaggtggcgggggatcaggtggcgggggatcaggtggcgggggatcacccgctgctctgctgcctgcccggggtaccaacatggcccagaagcgtcctgcctgcaccctgaagcctgagtgtgtccagcagctgctggtttgctcccaggaggccaagaagtcagcctactgcccctacagtcactttcctgtgggggctgccctgctcacccaggaggggagaatcttcaaagggtgcaacatagaaaatgcctgctacccgctgggcatctgtgctgaacggaccgctatccagaaggccgtctcagaagggtacaaggatttcagggcaattgctatcgccagtgacatgcaagatgattttatctctccatgtggggcctgcaggcaagtcatgagagagtttggcaccaactggcccgtgtacatgaccaagccggatggtacgtatattcaccatcatcatcaccat

SEQ ID NO: 495 - DNA, 1311 bp, synthetic construct
  source 1..1311: mol_type = other DNA
gacatccagatgacccagtctccatcttccgtgtctgcatctgtaggagacagagtcaccatcacttgtcgggcgagtcagggtattagcagctggttagcctggtatcagcagaaaccagggaaagcccctaagctcctgatctatgctgcatccagtttgcaaagtggggtcccatcaaggttcagcggcagtggatctgggacagatttcactctcaccatcagcagcctgcagcctgaagattttgcaacttattactgtcagcaaacaaatagtttcccttacacttttggcggagggaccaaggttgagatcaaaggagggggcggatcaggcggaggtggatcgggagggggtggtagcgaggtgcagctgttggagtctgggggaggcttggtacagcctggggggtccctgagactctcctgtgcagcctctggattcacctttagcaattatgccatgagctgggtccgccaggctccagggaaggggctggagtgggtctcagctattagtggtagtggtggtagcacatactacgcagactccgtgaagggccggttcaccatctccagagacaattccaagaacacgctgtatctgcaaatgaacagcctgagagccgaggacacggcggtgtactactgcgccaagggccctcctacataccacacaaactactactacatggacgtatggggcaagggtacaactgtcaccgtctcctcaggtggaggcggttcgggtggagggggatctggtggcggaggtagcggtggcgggggatcaggtggcgggggatcaggtggcgggggatcaggtggcgggggatcaggtggcgggggatcaggtggcgggggatcaggtggcgggggatcacccgctgctctgctgcctgcccggggtaccaacatggcccagaagcgtcctgcctgcaccctgaagcctgagtgtgtccagcagctgctggtttgctcccaggaggccaagaagtcagcctactgcccctacagtcactttcctgtgggggctgccctgctcacccaggaggggagaatcttcaaagggtgcaacatagaaaatgcctgctacccgctgggcatctgtgctgaacggaccgctatccagaaggccgtctcagaagggtacaaggatttcagggcaattgctatcgccagtgacatgcaagatgattttatctctccatgtggggcctgcaggcaagtcatgagagagtttggcaccaactggcccgtgtacatgaccaagccggatggtacgtatattcaccatcatcatcaccat

SEQ ID NO: 496 - DNA, 1326 bp, synthetic construct
  source 1..1326: mol_type = other DNA
gacatccagatgacccagtctccatcttccgtgtctgcatctgtaggagacagagtcaccatcacttgtcgggcgagtcagggtattagcagctggttagcctggtatcagcagaaaccagggaaagcccctaagctcctgatctatgctgcatccagtttgcaaagtggggtcccatcaaggttcagcggcagtggatctgggacagatttcactctcaccatcagcagcctgcagcctgaagattttgcaacttattactgtcagcaaacaaatagtttcccttacacttttggcggagggaccaaggttgagatcaaaggagggggcggatcaggcggaggtggatcgggagggggtggtagcgaggtgcagctgttggagtctgggggaggcttggtacagcctggggggtccctgagactctcctgtgcagcctctggattcacctttagcaattatgccatgagctgggtccgccaggctccagggaaggggctggagtgggtctcagctattagtggtagtggtggtagcacatactacgcagactccgtgaagggccggttcaccatctccagagacaattccaagaacacgctgtatctgcaaatgaacagcctgagagccgaggacacggcggtgtactactgcgccaagggccctcctacataccacacaaactactactacatggacgtatggggcaagggtacaactgtcaccgtctcctcaggtggaggcggttcgggtggagggggatctggtggcggaggtagcggtggcgggggatcaggtggcgggggatcaggtggcgggggatcaggtggcgggggatcaggtggcgggggatcaggtggcgggggatcaggtggcgggggatcaggtggcgggggatcacccgctgctctgctgcctgcccggggtaccaacatggcccagaagcgtcctgcctgcaccctgaagcctgagtgtgtccagcagctgctggtttgctcccaggaggccaagaagtcagcctactgcccctacagtcactttcctgtgggggctgccctgctcacccaggaggggagaatcttcaaagggtgcaacatagaaaatgcctgctacccgctgggcatctgtgctgaacggaccgctatccagaaggccgtctcagaagggtacaaggatttcagggcaattgctatcgccagtgacatgcaagatgattttatctctccatgtggggcctgcaggcaagtcatgagagagtttggcaccaactggcccgtgtacatgaccaagccggatggtacgtatattcaccatcatcatcaccat

SEQ ID NO: 497 - DNA, 1341 bp, synthetic construct
  source 1..1341: mol_type = other DNA
gacatccagatgacccagtctccatcttccgtgtctgcatctgtaggagacagagtcaccatcacttgtcgggcgagtcagggtattagcagctggttagcctggtatcagcagaaaccagggaaagcccctaagctcctgatctatgctgcatccagtttgcaaagtggggtcccatcaaggttcagcggcagtggatctgggacagatttcactctcaccatcagcagcctgcagcctgaagattttgcaacttattactgtcagcaaacaaatagtttcccttacacttttggcggagggaccaaggttgagatcaaaggagggggcggatcaggcggaggtggatcgggagggggtggtagcgaggtgcagctgttggagtctgggggaggcttggtacagcctggggggtccctgagactctcctgtgcagcctctggattcacctttagcaattatgccatgagctgggtccgccaggctccagggaaggggctggagtgggtctcagctattagtggtagtggtggtagcacatactacgcagactccgtgaagggccggttcaccatctccagagacaattccaagaacacgctgtatctgcaaatgaacagcctgagagccgaggacacggcggtgtactactgcgccaagggccctcctacataccacacaaactactactacatggacgtatggggcaagggtacaactgtcaccgtctcctcaggtggaggcggttcgggtggagggggatctggtggcggaggtagcggtggcgggggatcaggtggcgggggatcaggtggcgggggatcaggtggcgggggatcaggtggcgggggatcaggtggcgggggatcaggtggcgggggatcaggtggcgggggatcaggtggcgggggatcacccgctgctctgctgcctgcccggggtaccaacatggcccagaagcgtcctgcctgcaccctgaagcctgagtgtgtccagcagctgctggtttgctcccaggaggccaagaagtcagcctactgcccctacagtcactttcctgtgggggctgccctgctcacccaggaggggagaatcttcaaagggtgcaacatagaaaatgcctgctacccgctgggcatctgtgctgaacggaccgctatccagaaggccgtctcagaagggtacaaggatttcagggcaattgctatcgccagtgacatgcaagatgattttatctctccatgtggggcctgcaggcaagtcatgagagagtttggcaccaactggcccgtgtacatgaccaagccggatggtacgtatattcaccatcatcatcaccat

SEQ ID NO: 498 - DNA, 1176 bp, synthetic construct
  source 1..1176: mol_type = other DNA
gacatccagatgacccagtctccatcttccgtgtctgcatctgtaggagacagagtcaccatcacttgtcgggcgagtcagggtattagcagctggttagcctggtatcagcagaaaccagggaaagcccctaagctcctgatctatgctgcatccagtttgcaaagtggggtcccatcaaggttcagcggcagtggatctgggacagatttcactctcaccatcagcagcctgcagcctgaagattttgcaacttattactgtcagcaaacaaatagtttcccttacacttttggcggagggaccaaggttgagatcaaaggagggggcggatcaggcggaggtggatcgggagggggtggtagcgaggtgcagctgttggagtctgggggaggcttggtacagcctggggggtccctgagactctcctgtgcagcctctggattcacctttagcagctatgtcatgatctgggtccgccaggctccagggaaggggctggagtgggtctcaagcattagtggtgacagcgtaacaacatactacgcagactccgtgaagggccggttcaccatctccagagacaattccaagaacacgctgtatctgcaaatgaacagcctgagagccgaggacacggcggtgtactactgcgccaagggccctcctacataccacacaaactactactacatggacgtatggggcaagggtacaactgtcaccgtctcctcaggtggcgggggatcacccgctgctctgctgcctgcccggggtaccaacatggcccagaagcgtcctgcctgcaccctgaagcctgagtgtgtccagcagctgctggtttgctcccaggaggccaagaagtcagcctactgcccctacagtcactttcctgtgggggctgccctgctcacccaggaggggagaatcttcaaagggtgcaacatagaaaatgcctgctacccgctgggcatctgtgctgaacggaccgctatccagaaggccgtctcagaagggtacaaggatttcagggcaattgctatcgccagtgacatgcaagatgattttatctctccatgtggggcctgcaggcaagtcatgagagagtttggcaccaactggcccgtgtacatgaccaagccggatggtacgtatattcaccatcatcatcaccat

SEQ ID NO: 499 - DNA, 1206 bp, synthetic construct
  source 1..1206: mol_type = other DNA
gacatccagatgacccagtctccatcttccgtgtctgcatctgtaggagacagagtcaccatcacttgtcgggcgagtcagggtattagcagctggttagcctggtatcagcagaaaccagggaaagcccctaagctcctgatctatgctgcatccagtttgcaaagtggggtcccatcaaggttcagcggcagtggatctgggacagatttcactctcaccatcagcagcctgcagcctgaagattttgcaacttattactgtcagcaaacaaatagtttcccttacacttttggcggagggaccaaggttgagatcaaaggagggggcggatcaggcggaggtggatcgggagggggtggtagcgaggtgcagctgttggagtctgggggaggcttggtacagcctggggggtccctgagactctcctgtgcagcctctggattcacctttagcagctatgtcatgatctgggtccgccaggctccagggaaggggctggagtgggtctcaagcattagtggtgacagcgtaacaacatactacgcagactccgtgaagggccggttcaccatctccagagacaattccaagaacacgctgtatctgcaaatgaacagcctgagagccgaggacacggcggtgtactactgcgccaagggccctcctacataccacacaaactactactacatggacgtatggggcaagggtacaactgtcaccgtctcctcaggagggggcggatcaggcggaggtggatcgggagggggtggtagccccgctgctctgctgcctgcccggggtaccaacatggcccagaagcgtcctgcctgcaccctgaagcctgagtgtgtccagcagctgctggtttgctcccaggaggccaagaagtcagcctactgcccctacagtcactttcctgtgggggctgccctgctcacccaggaggggagaatcttcaaagggtgcaacatagaaaatgcctgctacccgctgggcatctgtgctgaacggaccgctatccagaaggccgtctcagaagggtacaaggatttcagggcaattgctatcgccagtgacatgcaagatgattttatctctccatgtggggcctgcaggcaagtcatgagagagtttggcaccaactggcccgtgtacatgaccaagccggatggtacgtatattcaccatcatcatcaccat

SEQ ID NO: 500 - DNA, 1221 bp, synthetic construct
  source 1..1221: mol_type = other DNA
gacatccagatgacccagtctccatcttccgtgtctgcatctgtaggagacagagtcaccatcacttgtcgggcgagtcagggtattagcagctggttagcctggtatcagcagaaaccagggaaagcccctaagctcctgatctatgctgcatccagtttgcaaagtggggtcccatcaaggttcagcggcagtggatctgggacagatttcactctcaccatcagcagcctgcagcctgaagattttgcaacttattactgtcagcaaacaaatagtttcccttacacttttggcggagggaccaaggttgagatcaaaggagggggcggatcaggcggaggtggatcgggagggggtggtagcgaggtgcagctgttggagtctgggggaggcttggtacagcctggggggtccctgagactctcctgtgcagcctctggattcacctttagcagctatgtcatgatctgggtccgccaggctccagggaaggggctggagtgggtctcaagcattagtggtgacagcgtaacaacatactacgcagactccgtgaagggccggttcaccatctccagagacaattccaagaacacgctgtatctgcaaatgaacagcctgagagccgaggacacggcggtgtactactgcgccaagggccctcctacataccacacaaactactactacatggacgtatggggcaagggtacaactgtcaccgtctcctcaggtggaggcggttcgggtggagggggatctggtggcggaggtagcggtggcgggggatcacccgctgctctgctgcctgcccggggtaccaacatggcccagaagcgtcctgcctgcaccctgaagcctgagtgtgtccagcagctgctggtttgctcccaggaggccaagaagtcagcctactgcccctacagtcactttcctgtgggggctgccctgctcacccaggaggggagaatcttcaaagggtgcaacatagaaaatgcctgctacccgctgggcatctgtgctgaacggaccgctatccagaaggccgtctcagaagggtacaaggatttcagggcaattgctatcgccagtgacatgcaagatgattttatctctccatgtggggcctgcaggcaagtcatgagagagtttggcaccaactggcccgtgtacatgaccaagccggatggtacgtatattcaccatcatcatcaccat

SEQ ID NO: 501 - DNA, 1236 bp, synthetic construct
  source 1..1236: mol_type = other DNA
gacatccagatgacccagtctccatcttccgtgtctgcatctgtaggagacagagtcaccatcacttgtcgggcgagtcagggtattagcagctggttagcctggtatcagcagaaaccagggaaagcccctaagctcctgatctatgctgcatccagtttgcaaagtggggtcccatcaaggttcagcggcagtggatctgggacagatttcactctcaccatcagcagcctgcagcctgaagattttgcaacttattactgtcagcaaacaaatagtttcccttacacttttggcggagggaccaaggttgagatcaaaggagggggcggatcaggcggaggtggatcgggagggggtggtagcgaggtgcagctgttggagtctgggggaggcttggtacagcctggggggtccctgagactctcctgtgcagcctctggattcacctttagcagctatgtcatgatctgggtccgccaggctccagggaaggggctggagtgggtctcaagcattagtggtgacagcgtaacaacatactacgcagactccgtgaagggccggttcaccatctccagagacaattccaagaacacgctgtatctgcaaatgaacagcctgagagccgaggacacggcggtgtactactgcgccaagggccctcctacataccacacaaactactactacatggacgtatggggcaagggtacaactgtcaccgtctcctcaggtggaggcggttcgggtggagggggatctggtggcggaggtagcggtggcgggggatcaggtggcgggggatcacccgctgctctgctgcctgcccggggtaccaacatggcccagaagcgtcctgcctgcaccctgaagcctgagtgtgtccagcagctgctggtttgctcccaggaggccaagaagtcagcctactgcccctacagtcactttcctgtgggggctgccctgctcacccaggaggggagaatcttcaaagggtgcaacatagaaaatgcctgctacccgctgggcatctgtgctgaacggaccgctatccagaaggccgtctcagaagggtacaaggatttcagggcaattgctatcgccagtgacatgcaagatgattttatctctccatgtggggcctgcaggcaagtcatgagagagtttggcaccaactggcccgtgtacatgaccaagccggatggtacgtatattcaccatcatcatcaccat

SEQ ID NO: 502 - DNA, 1251 bp, synthetic construct
  source 1..1251: mol_type = other DNA
gacatccagatgacccagtctccatcttccgtgtctgcatctgtaggagacagagtcaccatcacttgtcgggcgagtcagggtattagcagctggttagcctggtatcagcagaaaccagggaaagcccctaagctcctgatctatgctgcatccagtttgcaaagtggggtcccatcaaggttcagcggcagtggatctgggacagatttcactctcaccatcagcagcctgcagcctgaagattttgcaacttattactgtcagcaaacaaatagtttcccttacacttttggcggagggaccaaggttgagatcaaaggagggggcggatcaggcggaggtggatcgggagggggtggtagcgaggtgcagctgttggagtctgggggaggcttggtacagcctggggggtccctgagactctcctgtgcagcctctggattcacctttagcagctatgtcatgatctgggtccgccaggctccagggaaggggctggagtgggtctcaagcattagtggtgacagcgtaacaacatactacgcagactccgtgaagggccggttcaccatctccagagacaattccaagaacacgctgtatctgcaaatgaacagcctgagagccgaggacacggcggtgtactactgcgccaagggccctcctacataccacacaaactactactacatggacgtatggggcaagggtacaactgtcaccgtctcctcaggtggaggcggttcgggtggagggggatctggtggcggaggtagcggtggcgggggatcaggtggcgggggatcaggtggcgggggatcacccgctgctctgctgcctgcccggggtaccaacatggcccagaagcgtcctgcctgcaccctgaagcctgagtgtgtccagcagctgctggtttgctcccaggaggccaagaagtcagcctactgcccctacagtcactttcctgtgggggctgccctgctcacccaggaggggagaatcttcaaagggtgcaacatagaaaatgcctgctacccgctgggcatctgtgctgaacggaccgctatccagaaggccgtctcagaagggtacaaggatttcagggcaattgctatcgccagtgacatgcaagatgattttatctctccatgtggggcctgcaggcaagtcatgagagagtttggcaccaactggcccgtgtacatgaccaagccggatggtacgtatattcaccatcatcatcaccat

SEQ ID NO: 503 - DNA, 1266 bp, synthetic construct
  source 1..1266: mol_type = other DNA
gacatccagatgacccagtctccatcttccgtgtctgcatctgtaggagacagagtcaccatcacttgtcgggcgagtcagggtattagcagctggttagcctggtatcagcagaaaccagggaaagcccctaagctcctgatctatgctgcatccagtttgcaaagtggggtcccatcaaggttcagcggcagtggatctgggacagatttcactctcaccatcagcagcctgcagcctgaagattttgcaacttattactgtcagcaaacaaatagtttcccttacacttttggcggagggaccaaggttgagatcaaaggagggggcggatcaggcggaggtggatcgggagggggtggtagcgaggtgcagctgttggagtctgggggaggcttggtacagcctggggggtccctgagactctcctgtgcagcctctggattcacctttagcagctatgtcatgatctgggtccgccaggctccagggaaggggctggagtgggtctcaagcattagtggtgacagcgtaacaacatactacgcagactccgtgaagggccggttcaccatctccagagacaattccaagaacacgctgtatctgcaaatgaacagcctgagagccgaggacacggcggtgtactactgcgccaagggccctcctacataccacacaaactactactacatggacgtatggggcaagggtacaactgtcaccgtctcctcaggtggaggcggttcgggtggagggggatctggtggcggaggtagcggtggcgggggatcaggtggcgggggatcaggtggcgggggatcaggtggcgggggatcacccgctgctctgctgcctgcccggggtaccaacatggcccagaagcgtcctgcctgcaccctgaagcctgagtgtgtccagcagctgctggtttgctcccaggaggccaagaagtcagcctactgcccctacagtcactttcctgtgggggctgccctgctcacccaggaggggagaatcttcaaagggtgcaacatagaaaatgcctgctacccgctgggcatctgtgctgaacggaccgctatccagaaggccgtctcagaagggtacaaggatttcagggcaattgctatcgccagtgacatgcaagatgattttatctctccatgtggggcctgcaggcaagtcatgagagagtttggcaccaactggcccgtgtacatgaccaagccggatggtacgtatattcaccatcatcatcaccat

SEQ ID NO: 504 - DNA, 1281 bp, synthetic construct
  source 1..1281: mol_type = other DNA
gacatccagatgacccagtctccatcttccgtgtctgcatctgtaggagacagagtcaccatcacttgtcgggcgagtcagggtattagcagctggttagcctggtatcagcagaaaccagggaaagcccctaagctcctgatctatgctgcatccagtttgcaaagtggggtcccatcaaggttcagcggcagtggatctgggacagatttcactctcaccatcagcagcctgcagcctgaagattttgcaacttattactgtcagcaaacaaatagtttcccttacacttttggcggagggaccaaggttgagatcaaaggagggggcggatcaggcggaggtggatcgggagggggtggtagcgaggtgcagctgttggagtctgggggaggcttggtacagcctggggggtccctgagactctcctgtgcagcctctggattcacctttagcagctatgtcatgatctgggtccgccaggctccagggaaggggctggagtgggtctcaagcattagtggtgacagcgtaacaacatactacgcagactccgtgaagggccggttcaccatctccagagacaattccaagaacacgctgtatctgcaaatgaacagcctgagagccgaggacacggcggtgtactactgcgccaagggccctcctacataccacacaaactactactacatggacgtatggggcaagggtacaactgtcaccgtctcctcaggtggaggcggttcgggtggagggggatctggtggcggaggtagcggtggcgggggatcaggtggcgggggatcaggtggcgggggatcaggtggcgggggatcaggtggcgggggatcacccgctgctctgctgcctgcccggggtaccaacatggcccagaagcgtcctgcctgcaccctgaagcctgagtgtgtccagcagctgctggtttgctcccaggaggccaagaagtcagcctactgcccctacagtcactttcctgtgggggctgccctgctcacccaggaggggagaatcttcaaagggtgcaacatagaaaatgcctgctacccgctgggcatctgtgctgaacggaccgctatccagaaggccgtctcagaagggtacaaggatttcagggcaattgctatcgccagtgacatgcaagatgattttatctctccatgtggggcctgcaggcaagtcatgagagagtttggcaccaactggcccgtgtacatgaccaagccggatggtacgtatattcaccatcatcatcaccat

SEQ ID NO: 505 - DNA, 1296 bp, synthetic construct
  source 1..1296: mol_type = other DNA
gacatccagatgacccagtctccatcttccgtgtctgcatctgtaggagacagagtcaccatcacttgtcgggcgagtcagggtattagcagctggttagcctggtatcagcagaaaccagggaaagcccctaagctcctgatctatgctgcatccagtttgcaaagtggggtcccatcaaggttcagcggcagtggatctgggacagatttcactctcaccatcagcagcctgcagcctgaagattttgcaacttattactgtcagcaaacaaatagtttcccttacacttttggcggagggaccaaggttgagatcaaaggagggggcggatcaggcggaggtggatcgggagggggtggtagcgaggtgcagctgttggagtctgggggaggcttggtacagcctggggggtccctgagactctcctgtgcagcctctggattcacctttagcagctatgtcatgatctgggtccgccaggctccagggaaggggctggagtgggtctcaagcattagtggtgacagcgtaacaacatactacgcagactccgtgaagggccggttcaccatctccagagacaattccaagaacacgctgtatctgcaaatgaacagcctgagagccgaggacacggcggtgtactactgcgccaagggccctcctacataccacacaaactactactacatggacgtatggggcaagggtacaactgtcaccgtctcctcaggtggaggcggttcgggtggagggggatctggtggcggaggtagcggtggcgggggatcaggtggcgggggatcaggtggcgggggatcaggtggcgggggatcaggtggcgggggatcaggtggcgggggatcacccgctgctctgctgcctgcccggggtaccaacatggcccagaagcgtcctgcctgcaccctgaagcctgagtgtgtccagcagctgctggtttgctcccaggaggccaagaagtcagcctactgcccctacagtcactttcctgtgggggctgccctgctcacccaggaggggagaatcttcaaagggtgcaacatagaaaatgcctgctacccgctgggcatctgtgctgaacggaccgctatccagaaggccgtctcagaagggtacaaggatttcagggcaattgctatcgccagtgacatgcaagatgattttatctctccatgtggggcctgcaggcaagtcatgagagagtttggcaccaactggcccgtgtacatgaccaagccggatggtacgtatattcaccatcatcatcaccat

SEQ ID NO: 506 - DNA, 1311 bp, synthetic construct
  source 1..1311: mol_type = other DNA
gacatccagatgacccagtctccatcttccgtgtctgcatctgtaggagacagagtcaccatcacttgtcgggcgagtcagggtattagcagctggttagcctggtatcagcagaaaccagggaaagcccctaagctcctgatctatgctgcatccagtttgcaaagtggggtcccatcaaggttcagcggcagtggatctgggacagatttcactctcaccatcagcagcctgcagcctgaagattttgcaacttattactgtcagcaaacaaatagtttcccttacacttttggcggagggaccaaggttgagatcaaaggagggggcggatcaggcggaggtggatcgggagggggtggtagcgaggtgcagctgttggagtctgggggaggcttggtacagcctggggggtccctgagactctcctgtgcagcctctggattcacctttagcagctatgtcatgatctgggtccgccaggctccagggaaggggctggagtgggtctcaagcattagtggtgacagcgtaacaacatactacgcagactccgtgaagggccggttcaccatctccagagacaattccaagaacacgctgtatctgcaaatgaacagcctgagagccgaggacacggcggtgtactactgcgccaagggccctcctacataccacacaaactactactacatggacgtatggggcaagggtacaactgtcaccgtctcctcaggtggaggcggttcgggtggagggggatctggtggcggaggtagcggtggcgggggatcaggtggcgggggatcaggtggcgggggatcaggtggcgggggatcaggtggcgggggatcaggtggcgggggatcaggtggcgggggatcacccgctgctctgctgcctgcccggggtaccaacatggcccagaagcgtcctgcctgcaccctgaagcctgagtgtgtccagcagctgctggtttgctcccaggaggccaagaagtcagcctactgcccctacagtcactttcctgtgggggctgccctgctcacccaggaggggagaatcttcaaagggtgcaacatagaaaatgcctgctacccgctgggcatctgtgctgaacggaccgctatccagaaggccgtctcagaagggtacaaggatttcagggcaattgctatcgccagtgacatgcaagatgattttatctctccatgtggggcctgcaggcaagtcatgagagagtttggcaccaactggcccgtgtacatgaccaagccggatggtacgtatattcaccatcatcatcaccat

SEQ ID NO: 507 - DNA, 1326 bp, synthetic construct
  source 1..1326: mol_type = other DNA
gacatccagatgacccagtctccatcttccgtgtctgcatctgtaggagacagagtcaccatcacttgtcgggcgagtcagggtattagcagctggttagcctggtatcagcagaaaccagggaaagcccctaagctcctgatctatgctgcatccagtttgcaaagtggggtcccatcaaggttcagcggcagtggatctgggacagatttcactctcaccatcagcagcctgcagcctgaagattttgcaacttattactgtcagcaaacaaatagtttcccttacacttttggcggagggaccaaggttgagatcaaaggagggggcggatcaggcggaggtggatcgggagggggtggtagcgaggtgcagctgttggagtctgggggaggcttggtacagcctggggggtccctgagactctcctgtgcagcctctggattcacctttagcagctatgtcatgatctgggtccgccaggctccagggaaggggctggagtgggtctcaagcattagtggtgacagcgtaacaacatactacgcagactccgtgaagggccggttcaccatctccagagacaattccaagaacacgctgtatctgcaaatgaacagcctgagagccgaggacacggcggtgtactactgcgccaagggccctcctacataccacacaaactactactacatggacgtatggggcaagggtacaactgtcaccgtctcctcaggtggaggcggttcgggtggagggggatctggtggcggaggtagcggtggcgggggatcaggtggcgggggatcaggtggcgggggatcaggtggcgggggatcaggtggcgggggatcaggtggcgggggatcaggtggcgggggatcaggtggcgggggatcacccgctgctctgctgcctgcccggggtaccaacatggcccagaagcgtcctgcctgcaccctgaagcctgagtgtgtccagcagctgctggtttgctcccaggaggccaagaagtcagcctactgcccctacagtcactttcctgtgggggctgccctgctcacccaggaggggagaatcttcaaagggtgcaacatagaaaatgcctgctacccgctgggcatctgtgctgaacggaccgctatccagaaggccgtctcagaagggtacaaggatttcagggcaattgctatcgccagtgacatgcaagatgattttatctctccatgtggggcctgcaggcaagtcatgagagagtttggcaccaactggcccgtgtacatgaccaagccggatggtacgtatattcaccatcatcatcaccat

SEQ ID NO: 508 - DNA, 1341 bp, synthetic construct
  source 1..1341: mol_type = other DNA
gacatccagatgacccagtctccatcttccgtgtctgcatctgtaggagacagagtcaccatcacttgtcgggcgagtcagggtattagcagctggttagcctggtatcagcagaaaccagggaaagcccctaagctcctgatctatgctgcatccagtttgcaaagtggggtcccatcaaggttcagcggcagtggatctgggacagatttcactctcaccatcagcagcctgcagcctgaagattttgcaacttattactgtcagcaaacaaatagtttcccttacacttttggcggagggaccaaggttgagatcaaaggagggggcggatcaggcggaggtggatcgggagggggtggtagcgaggtgcagctgttggagtctgggggaggcttggtacagcctggggggtccctgagactctcctgtgcagcctctggattcacctttagcagctatgtcatgatctgggtccgccaggctccagggaaggggctggagtgggtctcaagcattagtggtgacagcgtaacaacatactacgcagactccgtgaagggccggttcaccatctccagagacaattccaagaacacgctgtatctgcaaatgaacagcctgagagccgaggacacggcggtgtactactgcgccaagggccctcctacataccacacaaactactactacatggacgtatggggcaagggtacaactgtcaccgtctcctcaggtggaggcggttcgggtggagggggatctggtggcggaggtagcggtggcgggggatcaggtggcgggggatcaggtggcgggggatcaggtggcgggggatcaggtggcgggggatcaggtggcgggggatcaggtggcgggggatcaggtggcgggggatcaggtggcgggggatcacccgctgctctgctgcctgcccggggtaccaacatggcccagaagcgtcctgcctgcaccctgaagcctgagtgtgtccagcagctgctggtttgctcccaggaggccaagaagtcagcctactgcccctacagtcactttcctgtgggggctgccctgctcacccaggaggggagaatcttcaaagggtgcaacatagaaaatgcctgctacccgctgggcatctgtgctgaacggaccgctatccagaaggccgtctcagaagggtacaaggatttcagggcaattgctatcgccagtgacatgcaagatgattttatctctccatgtggggcctgcaggcaagtcatgagagagtttggcaccaactggcccgtgtacatgaccaagccggatggtacgtatattcaccatcatcatcaccat

SEQ ID NO: 509 - DNA, 1170 bp, synthetic construct
  source 1..1170: mol_type = other DNA
gacatccagatgacccagtctccatcctccctgtctgcatctgtaggagacagagtcaccatcacttgccgggcaagtcagagcattagcagctatttaaattggtatcagcagaaaccagggaaagcccctaagctcctgatctatgctgcatccagtttgcaaagtggggtcccatcaaggttcagtggcagtggatctgggacagatttcactctcaccatcagcagtctgcaacctgaagattttgcaacttactactgtcagcaaagctacatcgccccttacacttttggcggagggaccaaggttgagatcaaaggagggggcggatcaggcggaggtggatcgggagggggtggtagcgaggtgcagctggtggagtctgggggaggcttggtccagcctggagggtccctgagactctcctgtgcagcctctggattcaccttcagtgaccactacatggactgggtccgccaggctccagggaaggggctggagtgggttggccgtactagaaacaaagctagtagttacaccacagaatacgccgcgtctgtgaaaggcagattcaccatctcaagagatgattcaaagaactcactgtatctgcaaatgaacagcctgaaaaccgaggacacggcggtgtactactgcgccagagagcctaaatactggatcgacttcgacctatgggggagaggtaccttggtcaccgtctcctcaggtggcgggggatcacccgctgctctgctgcctgcccggggtaccaacatggcccagaagcgtcctgcctgcaccctgaagcctgagtgtgtccagcagctgctggtttgctcccaggaggccaagaagtcagcctactgcccctacagtcactttcctgtgggggctgccctgctcacccaggaggggagaatcttcaaagggtgcaacatagaaaatgcctgctacccgctgggcatctgtgctgaacggaccgctatccagaaggccgtctcagaagggtacaaggatttcagggcaattgctatcgccagtgacatgcaagatgattttatctctccatgtggggcctgcaggcaagtcatgagagagtttggcaccaactggcccgtgtacatgaccaagccggatggtacgtatattcaccatcatcatcaccat

SEQ ID NO: 510 - DNA, 1200 bp, synthetic construct
  source 1..1200: mol_type = other DNA
gacatccagatgacccagtctccatcctccctgtctgcatctgtaggagacagagtcaccatcacttgccgggcaagtcagagcattagcagctatttaaattggtatcagcagaaaccagggaaagcccctaagctcctgatctatgctgcatccagtttgcaaagtggggtcccatcaaggttcagtggcagtggatctgggacagatttcactctcaccatcagcagtctgcaacctgaagattttgcaacttactactgtcagcaaagctacatcgccccttacacttttggcggagggaccaaggttgagatcaaaggagggggcggatcaggcggaggtggatcgggagggggtggtagcgaggtgcagctggtggagtctgggggaggcttggtccagcctggagggtccctgagactctcctgtgcagcctctggattcaccttcagtgaccactacatggactgggtccgccaggctccagggaaggggctggagtgggttggccgtactagaaacaaagctagtagttacaccacagaatacgccgcgtctgtgaaaggcagattcaccatctcaagagatgattcaaagaactcactgtatctgcaaatgaacagcctgaaaaccgaggacacggcggtgtactactgcgccagagagcctaaatactggatcgacttcgacctatgggggagaggtaccttggtcaccgtctcctcaggagggggcggatcaggcggaggtggatcgggagggggtggtagccccgctgctctgctgcctgcccggggtaccaacatggcccagaagcgtcctgcctgcaccctgaagcctgagtgtgtccagcagctgctggtttgctcccaggaggccaagaagtcagcctactgcccctacagtcactttcctgtgggggctgccctgctcacccaggaggggagaatcttcaaagggtgcaacatagaaaatgcctgctacccgctgggcatctgtgctgaacggaccgctatccagaaggccgtctcagaagggtacaaggatttcagggcaattgctatcgccagtgacatgcaagatgattttatctctccatgtggggcctgcaggcaagtcatgagagagtttggcaccaactggcccgtgtacatgaccaagccggatggtacgtatattcaccatcatcatcaccat

SEQ ID NO: 511 - DNA, 1215 bp, synthetic construct
  source 1..1215: mol_type = other DNA
gacatccagatgacccagtctccatcctccctgtctgcatctgtaggagacagagtcaccatcacttgccgggcaagtcagagcattagcagctatttaaattggtatcagcagaaaccagggaaagcccctaagctcctgatctatgctgcatccagtttgcaaagtggggtcccatcaaggttcagtggcagtggatctgggacagatttcactctcaccatcagcagtctgcaacctgaagattttgcaacttactactgtcagcaaagctacatcgccccttacacttttggcggagggaccaaggttgagatcaaaggagggggcggatcaggcggaggtggatcgggagggggtggtagcgaggtgcagctggtggagtctgggggaggcttggtccagcctggagggtccctgagactctcctgtgcagcctctggattcaccttcagtgaccactacatggactgggtccgccaggctccagggaaggggctggagtgggttggccgtactagaaacaaagctagtagttacaccacagaatacgccgcgtctgtgaaaggcagattcaccatctcaagagatgattcaaagaactcactgtatctgcaaatgaacagcctgaaaaccgaggacacggcggtgtactactgcgccagagagcctaaatactggatcgacttcgacctatgggggagaggtaccttggtcaccgtctcctcaggtggaggcggttcgggtggagggggatctggtggcggaggtagcggtggcgggggatcacccgctgctctgctgcctgcccggggtaccaacatggcccagaagcgtcctgcctgcaccctgaagcctgagtgtgtccagcagctgctggtttgctcccaggaggccaagaagtcagcctactgcccctacagtcactttcctgtgggggctgccctgctcacccaggaggggagaatcttcaaagggtgcaacatagaaaatgcctgctacccgctgggcatctgtgctgaacggaccgctatccagaaggccgtctcagaagggtacaaggatttcagggcaattgctatcgccagtgacatgcaagatgattttatctctccatgtggggcctgcaggcaagtcatgagagagtttggcaccaactggcccgtgtacatgaccaagccggatggtacgtatattcaccatcatcatcaccat

SEQ ID NO: 512 - DNA, 1230 bp, synthetic construct
  source 1..1230: mol_type = other DNA
gacatccagatgacccagtctccatcctccctgtctgcatctgtaggagacagagtcaccatcacttgccgggcaagtcagagcattagcagctatttaaattggtatcagcagaaaccagggaaagcccctaagctcctgatctatgctgcatccagtttgcaaagtggggtcccatcaaggttcagtggcagtggatctgggacagatttcactctcaccatcagcagtctgcaacctgaagattttgcaacttactactgtcagcaaagctacatcgccccttacacttttggcggagggaccaaggttgagatcaaaggagggggcggatcaggcggaggtggatcgggagggggtggtagcgaggtgcagctggtggagtctgggggaggcttggtccagcctggagggtccctgagactctcctgtgcagcctctggattcaccttcagtgaccactacatggactgggtccgccaggctccagggaaggggctggagtgggttggccgtactagaaacaaagctagtagttacaccacagaatacgccgcgtctgtgaaaggcagattcaccatctcaagagatgattcaaagaactcactgtatctgcaaatgaacagcctgaaaaccgaggacacggcggtgtactactgcgccagagagcctaaatactggatcgacttcgacctatgggggagaggtaccttggtcaccgtctcctcaggtggaggcggttcgggtggagggggatctggtggcggaggtagcggtggcgggggatcaggtggcgggggatcacccgctgctctgctgcctgcccggggtaccaacatggcccagaagcgtcctgcctgcaccctgaagcctgagtgtgtccagcagctgctggtttgctcccaggaggccaagaagtcagcctactgcccctacagtcactttcctgtgggggctgccctgctcacccaggaggggagaatcttcaaagggtgcaacatagaaaatgcctgctacccgctgggcatctgtgctgaacggaccgctatccagaaggccgtctcagaagggtacaaggatttcagggcaattgctatcgccagtgacatgcaagatgattttatctctccatgtggggcctgcaggcaagtcatgagagagtttggcaccaactggcccgtgtacatgaccaagccggatggtacgtatattcaccatcatcatcaccat

SEQ ID NO: 513 - DNA, 1245 bp, synthetic construct
  source 1..1245: mol_type = other DNA
gacatccagatgacccagtctccatcctccctgtctgcatctgtaggagacagagtcaccatcacttgccgggcaagtcagagcattagcagctatttaaattggtatcagcagaaaccagggaaagcccctaagctcctgatctatgctgcatccagtttgcaaagtggggtcccatcaaggttcagtggcagtggatctgggacagatttcactctcaccatcagcagtctgcaacctgaagattttgcaacttactactgtcagcaaagctacatcgccccttacacttttggcggagggaccaaggttgagatcaaaggagggggcggatcaggcggaggtggatcgggagggggtggtagcgaggtgcagctggtggagtctgggggaggcttggtccagcctggagggtccctgagactctcctgtgcagcctctggattcaccttcagtgaccactacatggactgggtccgccaggctccagggaaggggctggagtgggttggccgtactagaaacaaagctagtagttacaccacagaatacgccgcgtctgtgaaaggcagattcaccatctcaagagatgattcaaagaactcactgtatctgcaaatgaacagcctgaaaaccgaggacacggcggtgtactactgcgccagagagcctaaatactggatcgacttcgacctatgggggagaggtaccttggtcaccgtctcctcaggtggaggcggttcgggtggagggggatctggtggcggaggtagcggtggcgggggatcaggtggcgggggatcaggtggcgggggatcacccgctgctctgctgcctgcccggggtaccaacatggcccagaagcgtcctgcctgcaccctgaagcctgagtgtgtccagcagctgctggtttgctcccaggaggccaagaagtcagcctactgcccctacagtcactttcctgtgggggctgccctgctcacccaggaggggagaatcttcaaagggtgcaacatagaaaatgcctgctacccgctgggcatctgtgctgaacggaccgctatccagaaggccgtctcagaagggtacaaggatttcagggcaattgctatcgccagtgacatgcaagatgattttatctctccatgtggggcctgcaggcaagtcatgagagagtttggcaccaactggcccgtgtacatgaccaagccggatggtacgtatattcaccatcatcatcaccat

SEQ ID NO: 514 - DNA, 1260 bp, synthetic construct
  source 1..1260: mol_type = other DNA
gacatccagatgacccagtctccatcctccctgtctgcatctgtaggagacagagtcaccatcacttgccgggcaagtcagagcattagcagctatttaaattggtatcagcagaaaccagggaaagcccctaagctcctgatctatgctgcatccagtttgcaaagtggggtcccatcaaggttcagtggcagtggatctgggacagatttcactctcaccatcagcagtctgcaacctgaagattttgcaacttactactgtcagcaaagctacatcgccccttacacttttggcggagggaccaaggttgagatcaaaggagggggcggatcaggcggaggtggatcgggagggggtggtagcgaggtgcagctggtggagtctgggggaggcttggtccagcctggagggtccctgagactctcctgtgcagcctctggattcaccttcagtgaccactacatggactgggtccgccaggctccagggaaggggctggagtgggttggccgtactagaaacaaagctagtagttacaccacagaatacgccgcgtctgtgaaaggcagattcaccatctcaagagatgattcaaagaactcactgtatctgcaaatgaacagcctgaaaaccgaggacacggcggtgtactactgcgccagagagcctaaatactggatcgacttcgacctatgggggagaggtaccttggtcaccgtctcctcaggtggaggcggttcgggtggagggggatctggtggcggaggtagcggtggcgggggatcaggtggcgggggatcaggtggcgggggatcaggtggcgggggatcacccgctgctctgctgcctgcccggggtaccaacatggcccagaagcgtcctgcctgcaccctgaagcctgagtgtgtccagcagctgctggtttgctcccaggaggccaagaagtcagcctactgcccctacagtcactttcctgtgggggctgccctgctcacccaggaggggagaatcttcaaagggtgcaacatagaaaatgcctgctacccgctgggcatctgtgctgaacggaccgctatccagaaggccgtctcagaagggtacaaggatttcagggcaattgctatcgccagtgacatgcaagatgattttatctctccatgtggggcctgcaggcaagtcatgagagagtttggcaccaactggcccgtgtacatgaccaagccggatggtacgtatattcaccatcatcatcaccat

SEQ ID NO: 515 - DNA, 1275 bp, synthetic construct
  source 1..1275: mol_type = other DNA
gacatccagatgacccagtctccatcctccctgtctgcatctgtaggagacagagtcaccatcacttgccgggcaagtcagagcattagcagctatttaaattggtatcagcagaaaccagggaaagcccctaagctcctgatctatgctgcatccagtttgcaaagtggggtcccatcaaggttcagtggcagtggatctgggacagatttcactctcaccatcagcagtctgcaacctgaagattttgcaacttactactgtcagcaaagctacatcgccccttacacttttggcggagggaccaaggttgagatcaaaggagggggcggatcaggcggaggtggatcgggagggggtggtagcgaggtgcagctggtggagtctgggggaggcttggtccagcctggagggtccctgagactctcctgtgcagcctctggattcaccttcagtgaccactacatggactgggtccgccaggctccagggaaggggctggagtgggttggccgtactagaaacaaagctagtagttacaccacagaatacgccgcgtctgtgaaaggcagattcaccatctcaagagatgattcaaagaactcactgtatctgcaaatgaacagcctgaaaaccgaggacacggcggtgtactactgcgccagagagcctaaatactggatcgacttcgacctatgggggagaggtaccttggtcaccgtctcctcaggtggaggcggttcgggtggagggggatctggtggcggaggtagcggtggcgggggatcaggtggcgggggatcaggtggcgggggatcaggtggcgggggatcaggtggcgggggatcacccgctgctctgctgcctgcccggggtaccaacatggcccagaagcgtcctgcctgcaccctgaagcctgagtgtgtccagcagctgctggtttgctcccaggaggccaagaagtcagcctactgcccctacagtcactttcctgtgggggctgccctgctcacccaggaggggagaatcttcaaagggtgcaacatagaaaatgcctgctacccgctgggcatctgtgctgaacggaccgctatccagaaggccgtctcagaagggtacaaggatttcagggcaattgctatcgccagtgacatgcaagatgattttatctctccatgtggggcctgcaggcaagtcatgagagagtttggcaccaactggcccgtgtacatgaccaagccggatggtacgtatattcaccatcatcatcaccat

SEQ ID NO: 516 - DNA, 1290 bp, synthetic construct
  source 1..1290: mol_type = other DNA
gacatccagatgacccagtctccatcctccctgtctgcatctgtaggagacagagtcaccatcacttgccgggcaagtcagagcattagcagctatttaaattggtatcagcagaaaccagggaaagcccctaagctcctgatctatgctgcatccagtttgcaaagtggggtcccatcaaggttcagtggcagtggatctgggacagatttcactctcaccatcagcagtctgcaacctgaagattttgcaacttactactgtcagcaaagctacatcgccccttacacttttggcggagggaccaaggttgagatcaaaggagggggcggatcaggcggaggtggatcgggagggggtggtagcgaggtgcagctggtggagtctgggggaggcttggtccagcctggagggtccctgagactctcctgtgcagcctctggattcaccttcagtgaccactacatggactgggtccgccaggctccagggaaggggctggagtgggttggccgtactagaaacaaagctagtagttacaccacagaatacgccgcgtctgtgaaaggcagattcaccatctcaagagatgattcaaagaactcactgtatctgcaaatgaacagcctgaaaaccgaggacacggcggtgtactactgcgccagagagcctaaatactggatcgacttcgacctatgggggagaggtaccttggtcaccgtctcctcaggtggaggcggttcgggtggagggggatctggtggcggaggtagcggtggcgggggatcaggtggcgggggatcaggtggcgggggatcaggtggcgggggatcaggtggcgggggatcaggtggcgggggatcacccgctgctctgctgcctgcccggggtaccaacatggcccagaagcgtcctgcctgcaccctgaagcctgagtgtgtccagcagctgctggtttgctcccaggaggccaagaagtcagcctactgcccctacagtcactttcctgtgggggctgccctgctcacccaggaggggagaatcttcaaagggtgcaacatagaaaatgcctgctacccgctgggcatctgtgctgaacggaccgctatccagaaggccgtctcagaagggtacaaggatttcagggcaattgctatcgccagtgacatgcaagatgattttatctctccatgtggggcctgcaggcaagtcatgagagagtttggcaccaactggcccgtgtacatgaccaagccggatggtacgtatattcaccatcatcatcaccat

SEQ ID NO: 517 - DNA, 1305 bp, synthetic construct
  source 1..1305: mol_type = other DNA
gacatccagatgacccagtctccatcctccctgtctgcatctgtaggagacagagtcaccatcacttgccgggcaagtcagagcattagcagctatttaaattggtatcagcagaaaccagggaaagcccctaagctcctgatctatgctgcatccagtttgcaaagtggggtcccatcaaggttcagtggcagtggatctgggacagatttcactctcaccatcagcagtctgcaacctgaagattttgcaacttactactgtcagcaaagctacatcgccccttacacttttggcggagggaccaaggttgagatcaaaggagggggcggatcaggcggaggtggatcgggagggggtggtagcgaggtgcagctggtggagtctgggggaggcttggtccagcctggagggtccctgagactctcctgtgcagcctctggattcaccttcagtgaccactacatggactgggtccgccaggctccagggaaggggctggagtgggttggccgtactagaaacaaagctagtagttacaccacagaatacgccgcgtctgtgaaaggcagattcaccatctcaagagatgattcaaagaactcactgtatctgcaaatgaacagcctgaaaaccgaggacacggcggtgtactactgcgccagagagcctaaatactggatcgacttcgacctatgggggagaggtaccttggtcaccgtctcctcaggtggaggcggttcgggtggagggggatctggtggcggaggtagcggtggcgggggatcaggtggcgggggatcaggtggcgggggatcaggtggcgggggatcaggtggcgggggatcaggtggcgggggatcaggtggcgggggatcacccgctgctctgctgcctgcccggggtaccaacatggcccagaagcgtcctgcctgcaccctgaagcctgagtgtgtccagcagctgctggtttgctcccaggaggccaagaagtcagcctactgcccctacagtcactttcctgtgggggctgccctgctcacccaggaggggagaatcttcaaagggtgcaacatagaaaatgcctgctacccgctgggcatctgtgctgaacggaccgctatccagaaggccgtctcagaagggtacaaggatttcagggcaattgctatcgccagtgacatgcaagatgattttatctctccatgtggggcctgcaggcaagtcatgagagagtttggcaccaactggcccgtgtacatgaccaagccggatggtacgtatattcaccatcatcatcaccat

SEQ ID NO: 518 - DNA, 1320 bp, synthetic construct
  source 1..1320: mol_type = other DNA
gacatccagatgacccagtctccatcctccctgtctgcatctgtaggagacagagtcaccatcacttgccgggcaagtcagagcattagcagctatttaaattggtatcagcagaaaccagggaaagcccctaagctcctgatctatgctgcatccagtttgcaaagtggggtcccatcaaggttcagtggcagtggatctgggacagatttcactctcaccatcagcagtctgcaacctgaagattttgcaacttactactgtcagcaaagctacatcgccccttacacttttggcggagggaccaaggttgagatcaaaggagggggcggatcaggcggaggtggatcgggagggggtggtagcgaggtgcagctggtggagtctgggggaggcttggtccagcctggagggtccctgagactctcctgtgcagcctctggattcaccttcagtgaccactacatggactgggtccgccaggctccagggaaggggctggagtgggttggccgtactagaaacaaagctagtagttacaccacagaatacgccgcgtctgtgaaaggcagattcaccatctcaagagatgattcaaagaactcactgtatctgcaaatgaacagcctgaaaaccgaggacacggcggtgtactactgcgccagagagcctaaatactggatcgacttcgacctatgggggagaggtaccttggtcaccgtctcctcaggtggaggcggttcgggtggagggggatctggtggcggaggtagcggtggcgggggatcaggtggcgggggatcaggtggcgggggatcaggtggcgggggatcaggtggcgggggatcaggtggcgggggatcaggtggcgggggatcaggtggcgggggatcacccgctgctctgctgcctgcccggggtaccaacatggcccagaagcgtcctgcctgcaccctgaagcctgagtgtgtccagcagctgctggtttgctcccaggaggccaagaagtcagcctactgcccctacagtcactttcctgtgggggctgccctgctcacccaggaggggagaatcttcaaagggtgcaacatagaaaatgcctgctacccgctgggcatctgtgctgaacggaccgctatccagaaggccgtctcagaagggtacaaggatttcagggcaattgctatcgccagtgacatgcaagatgattttatctctccatgtggggcctgcaggcaagtcatgagagagtttggcaccaactggcccgtgtacatgaccaagccggatggtacgtatattcaccatcatcatcaccat

SEQ ID NO: 519 - DNA, 1335 bp, synthetic construct
  source 1..1335: mol_type = other DNA
gacatccagatgacccagtctccatcctccctgtctgcatctgtaggagacagagtcaccatcacttgccgggcaagtcagagcattagcagctatttaaattggtatcagcagaaaccagggaaagcccctaagctcctgatctatgctgcatccagtttgcaaagtggggtcccatcaaggttcagtggcagtggatctgggacagatttcactctcaccatcagcagtctgcaacctgaagattttgcaacttactactgtcagcaaagctacatcgccccttacacttttggcggagggaccaaggttgagatcaaaggagggggcggatcaggcggaggtggatcgggagggggtggtagcgaggtgcagctggtggagtctgggggaggcttggtccagcctggagggtccctgagactctcctgtgcagcctctggattcaccttcagtgaccactacatggactgggtccgccaggctccagggaaggggctggagtgggttggccgtactagaaacaaagctagtagttacaccacagaatacgccgcgtctgtgaaaggcagattcaccatctcaagagatgattcaaagaactcactgtatctgcaaatgaacagcctgaaaaccgaggacacggcggtgtactactgcgccagagagcctaaatactggatcgacttcgacctatgggggagaggtaccttggtcaccgtctcctcaggtggaggcggttcgggtggagggggatctggtggcggaggtagcggtggcgggggatcaggtggcgggggatcaggtggcgggggatcaggtggcgggggatcaggtggcgggggatcaggtggcgggggatcaggtggcgggggatcaggtggcgggggatcaggtggcgggggatcacccgctgctctgctgcctgcccggggtaccaacatggcccagaagcgtcctgcctgcaccctgaagcctgagtgtgtccagcagctgctggtttgctcccaggaggccaagaagtcagcctactgcccctacagtcactttcctgtgggggctgccctgctcacccaggaggggagaatcttcaaagggtgcaacatagaaaatgcctgctacccgctgggcatctgtgctgaacggaccgctatccagaaggccgtctcagaagggtacaaggatttcagggcaattgctatcgccagtgacatgcaagatgattttatctctccatgtggggcctgcaggcaagtcatgagagagtttggcaccaactggcccgtgtacatgaccaagccggatggtacgtatattcaccatcatcatcaccat

SEQ ID NO: 520 - DNA, 1143 bp, synthetic construct
  source 1..1143: mol_type = other DNA
gacatccagatgacccagtctccatcctccctgtctgcatctgtaggagacagagtcaccatcacttgccgggcaagtcagagcattagcagctatttaaattggtatcagcagaaaccagggaaagcccctaagctcctgatctatgctgcatccagtttgcaaagtggggtcccatcaaggttcagtggcagtggatctgggacagatttcactctcaccatcagcagtctgcaacctgaagattttgcaacttactactgtcagcaaagctacatcgccccttacacttttggcggagggaccaaggttgagatcaaaggagggggcggatcaggcggaggtggatcgggagggggtggtagcgaggtgcagctggtggagtctgggggaggcttggtacagccagggcggtccctgagactctcctgtacagcttctggattcaccttcagtgaccacgacatgaactgggtccgccaggctccagggaaggggctggagtgggttggccgtactagaaacgccgctggaagttacaccacagaatacgccgcgtctgtgaaaggcagattcaccatctcaagagatgattcaaagaactcactgtatctgcaaatgaacagcctgaaaaccgaggacacggcggtgtactactgcgccagagagcctaaatactggatcgacttcgacctatgggggggtggcgggggatcacccgctgctctgctgcctgcccggggtaccaacatggcccagaagcgtcctgcctgcaccctgaagcctgagtgtgtccagcagctgctggtttgctcccaggaggccaagaagtcagcctactgcccctacagtcactttcctgtgggggctgccctgctcacccaggaggggagaatcttcaaagggtgcaacatagaaaatgcctgctacccgctgggcatctgtgctgaacggaccgctatccagaaggccgtctcagaagggtacaaggatttcagggcaattgctatcgccagtgacatgcaagatgattttatctctccatgtggggcctgcaggcaagtcatgagagagtttggcaccaactggcccgtgtacatgaccaagccggatggtacgtatattcaccatcatcatcaccat

SEQ ID NO: 521 - DNA, 1173 bp, synthetic construct
  source 1..1173: mol_type = other DNA
gacatccagatgacccagtctccatcctccctgtctgcatctgtaggagacagagtcaccatcacttgccgggcaagtcagagcattagcagctatttaaattggtatcagcagaaaccagggaaagcccctaagctcctgatctatgctgcatccagtttgcaaagtggggtcccatcaaggttcagtggcagtggatctgggacagatttcactctcaccatcagcagtctgcaacctgaagattttgcaacttactactgtcagcaaagctacatcgccccttacacttttggcggagggaccaaggttgagatcaaaggagggggcggatcaggcggaggtggatcgggagggggtggtagcgaggtgcagctggtggagtctgggggaggcttggtacagccagggcggtccctgagactctcctgtacagcttctggattcaccttcagtgaccacgacatgaactgggtccgccaggctccagggaaggggctggagtgggttggccgtactagaaacgccgctggaagttacaccacagaatacgccgcgtctgtgaaaggcagattcaccatctcaagagatgattcaaagaactcactgtatctgcaaatgaacagcctgaaaaccgaggacacggcggtgtactactgcgccagagagcctaaatactggatcgacttcgacctatgggggggagggggcggatcaggcggaggtggatcgggagggggtggtagccccgctgctctgctgcctgcccggggtaccaacatggcccagaagcgtcctgcctgcaccctgaagcctgagtgtgtccagcagctgctggtttgctcccaggaggccaagaagtcagcctactgcccctacagtcactttcctgtgggggctgccctgctcacccaggaggggagaatcttcaaagggtgcaacatagaaaatgcctgctacccgctgggcatctgtgctgaacggaccgctatccagaaggccgtctcagaagggtacaaggatttcagggcaattgctatcgccagtgacatgcaagatgattttatctctccatgtggggcctgcaggcaagtcatgagagagtttggcaccaactggcccgtgtacatgaccaagccggatggtacgtatattcaccatcatcatcaccat

SEQ ID NO: 522 - DNA, 1188 bp, synthetic construct
  source 1..1188: mol_type = other DNA
gacatccagatgacccagtctccatcctccctgtctgcatctgtaggagacagagtcaccatcacttgccgggcaagtcagagcattagcagctatttaaattggtatcagcagaaaccagggaaagcccctaagctcctgatctatgctgcatccagtttgcaaagtggggtcccatcaaggttcagtggcagtggatctgggacagatttcactctcaccatcagcagtctgcaacctgaagattttgcaacttactactgtcagcaaagctacatcgccccttacacttttggcggagggaccaaggttgagatcaaaggagggggcggatcaggcggaggtggatcgggagggggtggtagcgaggtgcagctggtggagtctgggggaggcttggtacagccagggcggtccctgagactctcctgtacagcttctggattcaccttcagtgaccacgacatgaactgggtccgccaggctccagggaaggggctggagtgggttggccgtactagaaacgccgctggaagttacaccacagaatacgccgcgtctgtgaaaggcagattcaccatctcaagagatgattcaaagaactcactgtatctgcaaatgaacagcctgaaaaccgaggacacggcggtgtactactgcgccagagagcctaaatactggatcgacttcgacctatgggggggtggaggcggttcgggtggagggggatctggtggcggaggtagcggtggcgggggatcacccgctgctctgctgcctgcccggggtaccaacatggcccagaagcgtcctgcctgcaccctgaagcctgagtgtgtccagcagctgctggtttgctcccaggaggccaagaagtcagcctactgcccctacagtcactttcctgtgggggctgccctgctcacccaggaggggagaatcttcaaagggtgcaacatagaaaatgcctgctacccgctgggcatctgtgctgaacggaccgctatccagaaggccgtctcagaagggtacaaggatttcagggcaattgctatcgccagtgacatgcaagatgattttatctctccatgtggggcctgcaggcaagtcatgagagagtttggcaccaactggcccgtgtacatgaccaagccggatggtacgtatattcaccatcatcatcaccat

SEQ ID NO: 523 - DNA, 1203 bp, synthetic construct
  source 1..1203: mol_type = other DNA
gacatccagatgacccagtctccatcctccctgtctgcatctgtaggagacagagtcaccatcacttgccgggcaagtcagagcattagcagctatttaaattggtatcagcagaaaccagggaaagcccctaagctcctgatctatgctgcatccagtttgcaaagtggggtcccatcaaggttcagtggcagtggatctgggacagatttcactctcaccatcagcagtctgcaacctgaagattttgcaacttactactgtcagcaaagctacatcgccccttacacttttggcggagggaccaaggttgagatcaaaggagggggcggatcaggcggaggtggatcgggagggggtggtagcgaggtgcagctggtggagtctgggggaggcttggtacagccagggcggtccctgagactctcctgtacagcttctggattcaccttcagtgaccacgacatgaactgggtccgccaggctccagggaaggggctggagtgggttggccgtactagaaacgccgctggaagttacaccacagaatacgccgcgtctgtgaaaggcagattcaccatctcaagagatgattcaaagaactcactgtatctgcaaatgaacagcctgaaaaccgaggacacggcggtgtactactgcgccagagagcctaaatactggatcgacttcgacctatgggggggtggaggcggttcgggtggagggggatctggtggcggaggtagcggtggcgggggatcaggtggcgggggatcacccgctgctctgctgcctgcccggggtaccaacatggcccagaagcgtcctgcctgcaccctgaagcctgagtgtgtccagcagctgctggtttgctcccaggaggccaagaagtcagcctactgcccctacagtcactttcctgtgggggctgccctgctcacccaggaggggagaatcttcaaagggtgcaacatagaaaatgcctgctacccgctgggcatctgtgctgaacggaccgctatccagaaggccgtctcagaagggtacaaggatttcagggcaattgctatcgccagtgacatgcaagatgattttatctctccatgtggggcctgcaggcaagtcatgagagagtttggcaccaactggcccgtgtacatgaccaagccggatggtacgtatattcaccatcatcatcaccat

SEQ ID NO: 524 - DNA, 1218 bp, synthetic construct
  source 1..1218: mol_type = other DNA
gacatccagatgacccagtctccatcctccctgtctgcatctgtaggagacagagtcaccatcacttgccgggcaagtcagagcattagcagctatttaaattggtatcagcagaaaccagggaaagcccctaagctcctgatctatgctgcatccagtttgcaaagtggggtcccatcaaggttcagtggcagtggatctgggacagatttcactctcaccatcagcagtctgcaacctgaagattttgcaacttactactgtcagcaaagctacatcgccccttacacttttggcggagggaccaaggttgagatcaaaggagggggcggatcaggcggaggtggatcgggagggggtggtagcgaggtgcagctggtggagtctgggggaggcttggtacagccagggcggtccctgagactctcctgtacagcttctggattcaccttcagtgaccacgacatgaactgggtccgccaggctccagggaaggggctggagtgggttggccgtactagaaacgccgctggaagttacaccacagaatacgccgcgtctgtgaaaggcagattcaccatctcaagagatgattcaaagaactcactgtatctgcaaatgaacagcctgaaaaccgaggacacggcggtgtactactgcgccagagagcctaaatactggatcgacttcgacctatgggggggtggaggcggttcgggtggagggggatctggtggcggaggtagcggtggcgggggatcaggtggcgggggatcaggtggcgggggatcacccgctgctctgctgcctgcccggggtaccaacatggcccagaagcgtcctgcctgcaccctgaagcctgagtgtgtccagcagctgctggtttgctcccaggaggccaagaagtcagcctactgcccctacagtcactttcctgtgggggctgccctgctcacccaggaggggagaatcttcaaagggtgcaacatagaaaatgcctgctacccgctgggcatctgtgctgaacggaccgctatccagaaggccgtctcagaagggtacaaggatttcagggcaattgctatcgccagtgacatgcaagatgattttatctctccatgtggggcctgcaggcaagtcatgagagagtttggcaccaactggcccgtgtacatgaccaagccggatggtacgtatattcaccatcatcatcaccat

SEQ ID NO: 525 - DNA, 1233 bp, synthetic construct
  source 1..1233: mol_type = other DNA
gacatccagatgacccagtctccatcctccctgtctgcatctgtaggagacagagtcaccatcacttgccgggcaagtcagagcattagcagctatttaaattggtatcagcagaaaccagggaaagcccctaagctcctgatctatgctgcatccagtttgcaaagtggggtcccatcaaggttcagtggcagtggatctgggacagatttcactctcaccatcagcagtctgcaacctgaagattttgcaacttactactgtcagcaaagctacatcgccccttacacttttggcggagggaccaaggttgagatcaaaggagggggcggatcaggcggaggtggatcgggagggggtggtagcgaggtgcagctggtggagtctgggggaggcttggtacagccagggcggtccctgagactctcctgtacagcttctggattcaccttcagtgaccacgacatgaactgggtccgccaggctccagggaaggggctggagtgggttggccgtactagaaacgccgctggaagttacaccacagaatacgccgcgtctgtgaaaggcagattcaccatctcaagagatgattcaaagaactcactgtatctgcaaatgaacagcctgaaaaccgaggacacggcggtgtactactgcgccagagagcctaaatactggatcgacttcgacctatgggggggtggaggcggttcgggtggagggggatctggtggcggaggtagcggtggcgggggatcaggtggcgggggatcaggtggcgggggatcaggtggcgggggatcacccgctgctctgctgcctgcccggggtaccaacatggcccagaagcgtcctgcctgcaccctgaagcctgagtgtgtccagcagctgctggtttgctcccaggaggccaagaagtcagcctactgcccctacagtcactttcctgtgggggctgccctgctcacccaggaggggagaatcttcaaagggtgcaacatagaaaatgcctgctacccgctgggcatctgtgctgaacggaccgctatccagaaggccgtctcagaagggtacaaggatttcagggcaattgctatcgccagtgacatgcaagatgattttatctctccatgtggggcctgcaggcaagtcatgagagagtttggcaccaactggcccgtgtacatgaccaagccggatggtacgtatattcaccatcatcatcaccat

SEQ ID NO: 526 - DNA, 1248 bp, synthetic construct
  source 1..1248: mol_type = other DNA
gacatccagatgacccagtctccatcctccctgtctgcatctgtaggagacagagtcaccatcacttgccgggcaagtcagagcattagcagctatttaaattggtatcagcagaaaccagggaaagcccctaagctcctgatctatgctgcatccagtttgcaaagtggggtcccatcaaggttcagtggcagtggatctgggacagatttcactctcaccatcagcagtctgcaacctgaagattttgcaacttactactgtcagcaaagctacatcgccccttacacttttggcggagggaccaaggttgagatcaaaggagggggcggatcaggcggaggtggatcgggagggggtggtagcgaggtgcagctggtggagtctgggggaggcttggtacagccagggcggtccctgagactctcctgtacagcttctggattcaccttcagtgaccacgacatgaactgggtccgccaggctccagggaaggggctggagtgggttggccgtactagaaacgccgctggaagttacaccacagaatacgccgcgtctgtgaaaggcagattcaccatctcaagagatgattcaaagaactcactgtatctgcaaatgaacagcctgaaaaccgaggacacggcggtgtactactgcgccagagagcctaaatactggatcgacttcgacctatgggggggtggaggcggttcgggtggagggggatctggtggcggaggtagcggtggcgggggatcaggtggcgggggatcaggtggcgggggatcaggtggcgggggatcaggtggcgggggatcacccgctgctctgctgcctgcccggggtaccaacatggcccagaagcgtcctgcctgcaccctgaagcctgagtgtgtccagcagctgctggtttgctcccaggaggccaagaagtcagcctactgcccctacagtcactttcctgtgggggctgccctgctcacccaggaggggagaatcttcaaagggtgcaacatagaaaatgcctgctacccgctgggcatctgtgctgaacggaccgctatccagaaggccgtctcagaagggtacaaggatttcagggcaattgctatcgccagtgacatgcaagatgattttatctctccatgtggggcctgcaggcaagtcatgagagagtttggcaccaactggcccgtgtacatgaccaagccggatggtacgtatattcaccatcatcatcaccat

SEQ ID NO: 527 - DNA, 1263 bp, synthetic construct
  source 1..1263: mol_type = other DNA
gacatccagatgacccagtctccatcctccctgtctgcatctgtaggagacagagtcaccatcacttgccgggcaagtcagagcattagcagctatttaaattggtatcagcagaaaccagggaaagcccctaagctcctgatctatgctgcatccagtttgcaaagtggggtcccatcaaggttcagtggcagtggatctgggacagatttcactctcaccatcagcagtctgcaacctgaagattttgcaacttactactgtcagcaaagctacatcgccccttacacttttggcggagggaccaaggttgagatcaaaggagggggcggatcaggcggaggtggatcgggagggggtggtagcgaggtgcagctggtggagtctgggggaggcttggtacagccagggcggtccctgagactctcctgtacagcttctggattcaccttcagtgaccacgacatgaactgggtccgccaggctccagggaaggggctggagtgggttggccgtactagaaacgccgctggaagttacaccacagaatacgccgcgtctgtgaaaggcagattcaccatctcaagagatgattcaaagaactcactgtatctgcaaatgaacagcctgaaaaccgaggacacggcggtgtactactgcgccagagagcctaaatactggatcgacttcgacctatgggggggtggaggcggttcgggtggagggggatctggtggcggaggtagcggtggcgggggatcaggtggcgggggatcaggtggcgggggatcaggtggcgggggatcaggtggcgggggatcaggtggcgggggatcacccgctgctctgctgcctgcccggggtaccaacatggcccagaagcgtcctgcctgcaccctgaagcctgagtgtgtccagcagctgctggtttgctcccaggaggccaagaagtcagcctactgcccctacagtcactttcctgtgggggctgccctgctcacccaggaggggagaatcttcaaagggtgcaacatagaaaatgcctgctacccgctgggcatctgtgctgaacggaccgctatccagaaggccgtctcagaagggtacaaggatttcagggcaattgctatcgccagtgacatgcaagatgattttatctctccatgtggggcctgcaggcaagtcatgagagagtttggcaccaactggcccgtgtacatgaccaagccggatggtacgtatattcaccatcatcatcaccat

SEQ ID NO: 528 - DNA, 1278 bp, synthetic construct
  source 1..1278: mol_type = other DNA
gacatccagatgacccagtctccatcctccctgtctgcatctgtaggagacagagtcaccatcacttgccgggcaagtcagagcattagcagctatttaaattggtatcagcagaaaccagggaaagcccctaagctcctgatctatgctgcatccagtttgcaaagtggggtcccatcaaggttcagtggcagtggatctgggacagatttcactctcaccatcagcagtctgcaacctgaagattttgcaacttactactgtcagcaaagctacatcgccccttacacttttggcggagggaccaaggttgagatcaaaggagggggcggatcaggcggaggtggatcgggagggggtggtagcgaggtgcagctggtggagtctgggggaggcttggtacagccagggcggtccctgagactctcctgtacagcttctggattcaccttcagtgaccacgacatgaactgggtccgccaggctccagggaaggggctggagtgggttggccgtactagaaacgccgctggaagttacaccacagaatacgccgcgtctgtgaaaggcagattcaccatctcaagagatgattcaaagaactcactgtatctgcaaatgaacagcctgaaaaccgaggacacggcggtgtactactgcgccagagagcctaaatactggatcgacttcgacctatgggggggtggaggcggttcgggtggagggggatctggtggcggaggtagcggtggcgggggatcaggtggcgggggatcaggtggcgggggatcaggtggcgggggatcaggtggcgggggatcaggtggcgggggatcaggtggcgggggatcacccgctgctctgctgcctgcccggggtaccaacatggcccagaagcgtcctgcctgcaccctgaagcctgagtgtgtccagcagctgctggtttgctcccaggaggccaagaagtcagcctactgcccctacagtcactttcctgtgggggctgccctgctcacccaggaggggagaatcttcaaagggtgcaacatagaaaatgcctgctacccgctgggcatctgtgctgaacggaccgctatccagaaggccgtctcagaagggtacaaggatttcagggcaattgctatcgccagtgacatgcaagatgattttatctctccatgtggggcctgcaggcaagtcatgagagagtttggcaccaactggcccgtgtacatgaccaagccggatggtacgtatattcaccatcatcatcaccat

SEQ ID NO: 529 - DNA, 1293 bp, synthetic construct
  source 1..1293: mol_type = other DNA
gacatccagatgacccagtctccatcctccctgtctgcatctgtaggagacagagtcaccatcacttgccgggcaagtcagagcattagcagctatttaaattggtatcagcagaaaccagggaaagcccctaagctcctgatctatgctgcatccagtttgcaaagtggggtcccatcaaggttcagtggcagtggatctgggacagatttcactctcaccatcagcagtctgcaacctgaagattttgcaacttactactgtcagcaaagctacatcgccccttacacttttggcggagggaccaaggttgagatcaaaggagggggcggatcaggcggaggtggatcgggagggggtggtagcgaggtgcagctggtggagtctgggggaggcttggtacagccagggcggtccctgagactctcctgtacagcttctggattcaccttcagtgaccacgacatgaactgggtccgccaggctccagggaaggggctggagtgggttggccgtactagaaacgccgctggaagttacaccacagaatacgccgcgtctgtgaaaggcagattcaccatctcaagagatgattcaaagaactcactgtatctgcaaatgaacagcctgaaaaccgaggacacggcggtgtactactgcgccagagagcctaaatactggatcgacttcgacctatgggggggtggaggcggttcgggtggagggggatctggtggcggaggtagcggtggcgggggatcaggtggcgggggatcaggtggcgggggatcaggtggcgggggatcaggtggcgggggatcaggtggcgggggatcaggtggcgggggatcaggtggcgggggatcacccgctgctctgctgcctgcccggggtaccaacatggcccagaagcgtcctgcctgcaccctgaagcctgagtgtgtccagcagctgctggtttgctcccaggaggccaagaagtcagcctactgcccctacagtcactttcctgtgggggctgccctgctcacccaggaggggagaatcttcaaagggtgcaacatagaaaatgcctgctacccgctgggcatctgtgctgaacggaccgctatccagaaggccgtctcagaagggtacaaggatttcagggcaattgctatcgccagtgacatgcaagatgattttatctctccatgtggggcctgcaggcaagtcatgagagagtttggcaccaactggcccgtgtacatgaccaagccggatggtacgtatattcaccatcatcatcaccat

SEQ ID NO: 530 - DNA, 1308 bp, synthetic construct
  source 1..1308: mol_type = other DNA
gacatccagatgacccagtctccatcctccctgtctgcatctgtaggagacagagtcaccatcacttgccgggcaagtcagagcattagcagctatttaaattggtatcagcagaaaccagggaaagcccctaagctcctgatctatgctgcatccagtttgcaaagtggggtcccatcaaggttcagtggcagtggatctgggacagatttcactctcaccatcagcagtctgcaacctgaagattttgcaacttactactgtcagcaaagctacatcgccccttacacttttggcggagggaccaaggttgagatcaaaggagggggcggatcaggcggaggtggatcgggagggggtggtagcgaggtgcagctggtggagtctgggggaggcttggtacagccagggcggtccctgagactctcctgtacagcttctggattcaccttcagtgaccacgacatgaactgggtccgccaggctccagggaaggggctggagtgggttggccgtactagaaacgccgctggaagttacaccacagaatacgccgcgtctgtgaaaggcagattcaccatctcaagagatgattcaaagaactcactgtatctgcaaatgaacagcctgaaaaccgaggacacggcggtgtactactgcgccagagagcctaaatactggatcgacttcgacctatgggggggtggaggcggttcgggtggagggggatctggtggcggaggtagcggtggcgggggatcaggtggcgggggatcaggtggcgggggatcaggtggcgggggatcaggtggcgggggatcaggtggcgggggatcaggtggcgggggatcaggtggcgggggatcaggtggcgggggatcacccgctgctctgctgcctgcccggggtaccaacatggcccagaagcgtcctgcctgcaccctgaagcctgagtgtgtccagcagctgctggtttgctcccaggaggccaagaagtcagcctactgcccctacagtcactttcctgtgggggctgccctgctcacccaggaggggagaatcttcaaagggtgcaacatagaaaatgcctgctacccgctgggcatctgtgctgaacggaccgctatccagaaggccgtctcagaagggtacaaggatttcagggcaattgctatcgccagtgacatgcaagatgattttatctctccatgtggggcctgcaggcaagtcatgagagagtttggcaccaactggcccgtgtacatgaccaagccggatggtacgtatattcaccatcatcatcaccat

SEQ ID NO: 531 - DNA, 1170 bp, synthetic construct
  source 1..1170: mol_type = other DNA
gaggtgcagctggtggagtctgggggaggcttggtccagcctggagggtccctgagactctcctgtgcagcctctggattcaccttcgtagaccacgacatggactgggtccgccaggctccagggaaggggctggagtgggttggccgtactagaaacaaactaggaagttacaccacagaatacgccgcgtctgtgaaaggcagattcaccatctcaagagatgattcaaagaactcactgtatctgcaaatgaacagcctgaaaaccgaggacacggcggtgtactactgcgccagagagcctaaatactggatcgacttcgacctatgggggagaggtaccttggtcaccgtctcctcaggagggggcggatcaggcggaggtggatcgggagggggtggtagcgacatccagatgacccagtctccatcctccctgtctgcatctgtaggagacagagtcaccatcacttgccgggcaagtcagagcattagcagctatttaaattggtatcagcagaaaccagggaaagcccctaagctcctgatctatgctgcatccagtttgcaaagtggggtcccatcaaggttcagtggcagtggatgcggtacagatttcactctcaccatcagcagtctgcaacctgaagattttgcaacttactactgtcagcaaagctacatcgccccttacacttttggcggagggaccaaggttgagatcaaaggtggcgggggatcacccgctgctctgctgcctgcccggggtaccaacatggcccagaagcgtcctgcctgcaccctgaagcctgagtgtgtccagcagctgctggtttgctcccaggaggccaagaagtcagcctactgcccctacagtcactttcctgtgggggctgccctgctcacccaggaggggagaatcttcaaagggtgcaacatagaaaatgcctgctacccgctgggcatctgtgctgaacggaccgctatccagaaggccgtctcagaagggtacaaggatttcagggcaattgctatcgccagtgacatgcaagatgattttatctctccatgtggggcctgcaggcaagtcatgagagagtttggcaccaactggcccgtgtacatgaccaagccggatggtacgtatattcaccatcatcatcaccat

SEQ ID NO: 532 - DNA, 1200 bp, synthetic construct
  source 1..1200: mol_type = other DNA
gaggtgcagctggtggagtctgggggaggcttggtccagcctggagggtccctgagactctcctgtgcagcctctggattcaccttcgtagaccacgacatggactgggtccgccaggctccagggaaggggctggagtgggttggccgtactagaaacaaactaggaagttacaccacagaatacgccgcgtctgtgaaaggcagattcaccatctcaagagatgattcaaagaactcactgtatctgcaaatgaacagcctgaaaaccgaggacacggcggtgtactactgcgccagagagcctaaatactggatcgacttcgacctatgggggagaggtaccttggtcaccgtctcctcaggagggggcggatcaggcggaggtggatcgggagggggtggtagcgacatccagatgacccagtctccatcctccctgtctgcatctgtaggagacagagtcaccatcacttgccgggcaagtcagagcattagcagctatttaaattggtatcagcagaaaccagggaaagcccctaagctcctgatctatgctgcatccagtttgcaaagtggggtcccatcaaggttcagtggcagtggatgcggtacagatttcactctcaccatcagcagtctgcaacctgaagattttgcaacttactactgtcagcaaagctacatcgccccttacacttttggcggagggaccaaggttgagatcaaaggagggggcggatcaggcggaggtggatcgggagggggtggtagccccgctgctctgctgcctgcccggggtaccaacatggcccagaagcgtcctgcctgcaccctgaagcctgagtgtgtccagcagctgctggtttgctcccaggaggccaagaagtcagcctactgcccctacagtcactttcctgtgggggctgccctgctcacccaggaggggagaatcttcaaagggtgcaacatagaaaatgcctgctacccgctgggcatctgtgctgaacggaccgctatccagaaggccgtctcagaagggtacaaggatttcagggcaattgctatcgccagtgacatgcaagatgattttatctctccatgtggggcctgcaggcaagtcatgagagagtttggcaccaactggcccgtgtacatgaccaagccggatggtacgtatattcaccatcatcatcaccat

SEQ ID NO: 533 - DNA, 1215 bp, synthetic construct
  source 1..1215: mol_type = other DNA
gaggtgcagctggtggagtctgggggaggcttggtccagcctggagggtccctgagactctcctgtgcagcctctggattcaccttcgtagaccacgacatggactgggtccgccaggctccagggaaggggctggagtgggttggccgtactagaaacaaactaggaagttacaccacagaatacgccgcgtctgtgaaaggcagattcaccatctcaagagatgattcaaagaactcactgtatctgcaaatgaacagcctgaaaaccgaggacacggcggtgtactactgcgccagagagcctaaatactggatcgacttcgacctatgggggagaggtaccttggtcaccgtctcctcaggagggggcggatcaggcggaggtggatcgggagggggtggtagcgacatccagatgacccagtctccatcctccctgtctgcatctgtaggagacagagtcaccatcacttgccgggcaagtcagagcattagcagctatttaaattggtatcagcagaaaccagggaaagcccctaagctcctgatctatgctgcatccagtttgcaaagtggggtcccatcaaggttcagtggcagtggatgcggtacagatttcactctcaccatcagcagtctgcaacctgaagattttgcaacttactactgtcagcaaagctacatcgccccttacacttttggcggagggaccaaggttgagatcaaaggtggaggcggttcgggtggagggggatctggtggcggaggtagcggtggcgggggatcacccgctgctctgctgcctgcccggggtaccaacatggcccagaagcgtcctgcctgcaccctgaagcctgagtgtgtccagcagctgctggtttgctcccaggaggccaagaagtcagcctactgcccctacagtcactttcctgtgggggctgccctgctcacccaggaggggagaatcttcaaagggtgcaacatagaaaatgcctgctacccgctgggcatctgtgctgaacggaccgctatccagaaggccgtctcagaagggtacaaggatttcagggcaattgctatcgccagtgacatgcaagatgattttatctctccatgtggggcctgcaggcaagtcatgagagagtttggcaccaactggcccgtgtacatgaccaagccggatggtacgtatattcaccatcatcatcaccat

SEQ ID NO: 534 - DNA, 1230 bp, synthetic construct
  source 1..1230: mol_type = other DNA
gaggtgcagctggtggagtctgggggaggcttggtccagcctggagggtccctgagactctcctgtgcagcctctggattcaccttcgtagaccacgacatggactgggtccgccaggctccagggaaggggctggagtgggttggccgtactagaaacaaactaggaagttacaccacagaatacgccgcgtctgtgaaaggcagattcaccatctcaagagatgattcaaagaactcactgtatctgcaaatgaacagcctgaaaaccgaggacacggcggtgtactactgcgccagagagcctaaatactggatcgacttcgacctatgggggagaggtaccttggtcaccgtctcctcaggagggggcggatcaggcggaggtggatcgggagggggtggtagcgacatccagatgacccagtctccatcctccctgtctgcatctgtaggagacagagtcaccatcacttgccgggcaagtcagagcattagcagctatttaaattggtatcagcagaaaccagggaaagcccctaagctcctgatctatgctgcatccagtttgcaaagtggggtcccatcaaggttcagtggcagtggatgcggtacagatttcactctcaccatcagcagtctgcaacctgaagattttgcaacttactactgtcagcaaagctacatcgccccttacacttttggcggagggaccaaggttgagatcaaaggtggaggcggttcgggtggagggggatctggtggcggaggtagcggtggcgggggatcaggtggcgggggatcacccgctgctctgctgcctgcccggggtaccaacatggcccagaagcgtcctgcctgcaccctgaagcctgagtgtgtccagcagctgctggtttgctcccaggaggccaagaagtcagcctactgcccctacagtcactttcctgtgggggctgccctgctcacccaggaggggagaatcttcaaagggtgcaacatagaaaatgcctgctacccgctgggcatctgtgctgaacggaccgctatccagaaggccgtctcagaagggtacaaggatttcagggcaattgctatcgccagtgacatgcaagatgattttatctctccatgtggggcctgcaggcaagtcatgagagagtttggcaccaactggcccgtgtacatgaccaagccggatggtacgtatattcaccatcatcatcaccat

SEQ ID NO: 535 - DNA, 1245 bp, synthetic construct
  source 1..1245: mol_type = other DNA
gaggtgcagctggtggagtctgggggaggcttggtccagcctggagggtccctgagactctcctgtgcagcctctggattcaccttcgtagaccacgacatggactgggtccgccaggctccagggaaggggctggagtgggttggccgtactagaaacaaactaggaagttacaccacagaatacgccgcgtctgtgaaaggcagattcaccatctcaagagatgattcaaagaactcactgtatctgcaaatgaacagcctgaaaaccgaggacacggcggtgtactactgcgccagagagcctaaatactggatcgacttcgacctatgggggagaggtaccttggtcaccgtctcctcaggagggggcggatcaggcggaggtggatcgggagggggtggtagcgacatccagatgacccagtctccatcctccctgtctgcatctgtaggagacagagtcaccatcacttgccgggcaagtcagagcattagcagctatttaaattggtatcagcagaaaccagggaaagcccctaagctcctgatctatgctgcatccagtttgcaaagtggggtcccatcaaggttcagtggcagtggatgcggtacagatttcactctcaccatcagcagtctgcaacctgaagattttgcaacttactactgtcagcaaagctacatcgccccttacacttttggcggagggaccaaggttgagatcaaaggtggaggcggttcgggtggagggggatctggtggcggaggtagcggtggcgggggatcaggtggcgggggatcaggtggcgggggatcacccgctgctctgctgcctgcccggggtaccaacatggcccagaagcgtcctgcctgcaccctgaagcctgagtgtgtccagcagctgctggtttgctcccaggaggccaagaagtcagcctactgcccctacagtcactttcctgtgggggctgccctgctcacccaggaggggagaatcttcaaagggtgcaacatagaaaatgcctgctacccgctgggcatctgtgctgaacggaccgctatccagaaggccgtctcagaagggtacaaggatttcagggcaattgctatcgccagtgacatgcaagatgattttatctctccatgtggggcctgcaggcaagtcatgagagagtttggcaccaactggcccgtgtacatgaccaagccggatggtacgtatattcaccatcatcatcaccat

SEQ ID NO: 536 - DNA, 1260 bp, synthetic construct
  source 1..1260: mol_type = other DNA
gaggtgcagctggtggagtctgggggaggcttggtccagcctggagggtccctgagactctcctgtgcagcctctggattcaccttcgtagaccacgacatggactgggtccgccaggctccagggaaggggctggagtgggttggccgtactagaaacaaactaggaagttacaccacagaatacgccgcgtctgtgaaaggcagattcaccatctcaagagatgattcaaagaactcactgtatctgcaaatgaacagcctgaaaaccgaggacacggcggtgtactactgcgccagagagcctaaatactggatcgacttcgacctatgggggagaggtaccttggtcaccgtctcctcaggagggggcggatcaggcggaggtggatcgggagggggtggtagcgacatccagatgacccagtctccatcctccctgtctgcatctgtaggagacagagtcaccatcacttgccgggcaagtcagagcattagcagctatttaaattggtatcagcagaaaccagggaaagcccctaagctcctgatctatgctgcatccagtttgcaaagtggggtcccatcaaggttcagtggcagtggatgcggtacagatttcactctcaccatcagcagtctgcaacctgaagattttgcaacttactactgtcagcaaagctacatcgccccttacacttttggcggagggaccaaggttgagatcaaaggtggaggcggttcgggtggagggggatctggtggcggaggtagcggtggcgggggatcaggtggcgggggatcaggtggcgggggatcaggtggcgggggatcacccgctgctctgctgcctgcccggggtaccaacatggcccagaagcgtcctgcctgcaccctgaagcctgagtgtgtccagcagctgctggtttgctcccaggaggccaagaagtcagcctactgcccctacagtcactttcctgtgggggctgccctgctcacccaggaggggagaatcttcaaagggtgcaacatagaaaatgcctgctacccgctgggcatctgtgctgaacggaccgctatccagaaggccgtctcagaagggtacaaggatttcagggcaattgctatcgccagtgacatgcaagatgattttatctctccatgtggggcctgcaggcaagtcatgagagagtttggcaccaactggcccgtgtacatgaccaagccggatggtacgtatattcaccatcatcatcaccat

SEQ ID NO: 537 - DNA, 1275 bp, synthetic construct
  source 1..1275: mol_type = other DNA
gaggtgcagctggtggagtctgggggaggcttggtccagcctggagggtccctgagactctcctgtgcagcctctggattcaccttcgtagaccacgacatggactgggtccgccaggctccagggaaggggctggagtgggttggccgtactagaaacaaactaggaagttacaccacagaatacgccgcgtctgtgaaaggcagattcaccatctcaagagatgattcaaagaactcactgtatctgcaaatgaacagcctgaaaaccgaggacacggcggtgtactactgcgccagagagcctaaatactggatcgacttcgacctatgggggagaggtaccttggtcaccgtctcctcaggagggggcggatcaggcggaggtggatcgggagggggtggtagcgacatccagatgacccagtctccatcctccctgtctgcatctgtaggagacagagtcaccatcacttgccgggcaagtcagagcattagcagctatttaaattggtatcagcagaaaccagggaaagcccctaagctcctgatctatgctgcatccagtttgcaaagtggggtcccatcaaggttcagtggcagtggatgcggtacagatttcactctcaccatcagcagtctgcaacctgaagattttgcaacttactactgtcagcaaagctacatcgccccttacacttttggcggagggaccaaggttgagatcaaaggtggaggcggttcgggtggagggggatctggtggcggaggtagcggtggcgggggatcaggtggcgggggatcaggtggcgggggatcaggtggcgggggatcaggtggcgggggatcacccgctgctctgctgcctgcccggggtaccaacatggcccagaagcgtcctgcctgcaccctgaagcctgagtgtgtccagcagctgctggtttgctcccaggaggccaagaagtcagcctactgcccctacagtcactttcctgtgggggctgccctgctcacccaggaggggagaatcttcaaagggtgcaacatagaaaatgcctgctacccgctgggcatctgtgctgaacggaccgctatccagaaggccgtctcagaagggtacaaggatttcagggcaattgctatcgccagtgacatgcaagatgattttatctctccatgtggggcctgcaggcaagtcatgagagagtttggcaccaactggcccgtgtacatgaccaagccggatggtacgtatattcaccatcatcatcaccat

SEQ ID NO: 538 - DNA, 1290 bp, synthetic construct
  source 1..1290: mol_type = other DNA
gaggtgcagctggtggagtctgggggaggcttggtccagcctggagggtccctgagactctcctgtgcagcctctggattcaccttcgtagaccacgacatggactgggtccgccaggctccagggaaggggctggagtgggttggccgtactagaaacaaactaggaagttacaccacagaatacgccgcgtctgtgaaaggcagattcaccatctcaagagatgattcaaagaactcactgtatctgcaaatgaacagcctgaaaaccgaggacacggcggtgtactactgcgccagagagcctaaatactggatcgacttcgacctatgggggagaggtaccttggtcaccgtctcctcaggagggggcggatcaggcggaggtggatcgggagggggtggtagcgacatccagatgacccagtctccatcctccctgtctgcatctgtaggagacagagtcaccatcacttgccgggcaagtcagagcattagcagctatttaaattggtatcagcagaaaccagggaaagcccctaagctcctgatctatgctgcatccagtttgcaaagtggggtcccatcaaggttcagtggcagtggatgcggtacagatttcactctcaccatcagcagtctgcaacctgaagattttgcaacttactactgtcagcaaagctacatcgccccttacacttttggcggagggaccaaggttgagatcaaaggtggaggcggttcgggtggagggggatctggtggcggaggtagcggtggcgggggatcaggtggcgggggatcaggtggcgggggatcaggtggcgggggatcaggtggcgggggatcaggtggcgggggatcacccgctgctctgctgcctgcccggggtaccaacatggcccagaagcgtcctgcctgcaccctgaagcctgagtgtgtccagcagctgctggtttgctcccaggaggccaagaagtcagcctactgcccctacagtcactttcctgtgggggctgccctgctcacccaggaggggagaatcttcaaagggtgcaacatagaaaatgcctgctacccgctgggcatctgtgctgaacggaccgctatccagaaggccgtctcagaagggtacaaggatttcagggcaattgctatcgccagtgacatgcaagatgattttatctctccatgtggggcctgcaggcaagtcatgagagagtttggcaccaactggcccgtgtacatgaccaagccggatggtacgtatattcaccatcatcatcaccat

SEQ ID NO: 539 - DNA, 1305 bp, synthetic construct
  source 1..1305: mol_type = other DNA
gaggtgcagctggtggagtctgggggaggcttggtccagcctggagggtccctgagactctcctgtgcagcctctggattcaccttcgtagaccacgacatggactgggtccgccaggctccagggaaggggctggagtgggttggccgtactagaaacaaactaggaagttacaccacagaatacgccgcgtctgtgaaaggcagattcaccatctcaagagatgattcaaagaactcactgtatctgcaaatgaacagcctgaaaaccgaggacacggcggtgtactactgcgccagagagcctaaatactggatcgacttcgacctatgggggagaggtaccttggtcaccgtctcctcaggagggggcggatcaggcggaggtggatcgggagggggtggtagcgacatccagatgacccagtctccatcctccctgtctgcatctgtaggagacagagtcaccatcacttgccgggcaagtcagagcattagcagctatttaaattggtatcagcagaaaccagggaaagcccctaagctcctgatctatgctgcatccagtttgcaaagtggggtcccatcaaggttcagtggcagtggatgcggtacagatttcactctcaccatcagcagtctgcaacctgaagattttgcaacttactactgtcagcaaagctacatcgccccttacacttttggcggagggaccaaggttgagatcaaaggtggaggcggttcgggtggagggggatctggtggcggaggtagcggtggcgggggatcaggtggcgggggatcaggtggcgggggatcaggtggcgggggatcaggtggcgggggatcaggtggcgggggatcaggtggcgggggatcacccgctgctctgctgcctgcccggggtaccaacatggcccagaagcgtcctgcctgcaccctgaagcctgagtgtgtccagcagctgctggtttgctcccaggaggccaagaagtcagcctactgcccctacagtcactttcctgtgggggctgccctgctcacccaggaggggagaatcttcaaagggtgcaacatagaaaatgcctgctacccgctgggcatctgtgctgaacggaccgctatccagaaggccgtctcagaagggtacaaggatttcagggcaattgctatcgccagtgacatgcaagatgattttatctctccatgtggggcctgcaggcaagtcatgagagagtttggcaccaactggcccgtgtacatgaccaagccggatggtacgtatattcaccatcatcatcaccat

SEQ ID NO: 540 - DNA, 1320 bp, synthetic construct
  source 1..1320: mol_type = other DNA
gaggtgcagctggtggagtctgggggaggcttggtccagcctggagggtccctgagactctcctgtgcagcctctggattcaccttcgtagaccacgacatggactgggtccgccaggctccagggaaggggctggagtgggttggccgtactagaaacaaactaggaagttacaccacagaatacgccgcgtctgtgaaaggcagattcaccatctcaagagatgattcaaagaactcactgtatctgcaaatgaacagcctgaaaaccgaggacacggcggtgtactactgcgccagagagcctaaatactggatcgacttcgacctatgggggagaggtaccttggtcaccgtctcctcaggagggggcggatcaggcggaggtggatcgggagggggtggtagcgacatccagatgacccagtctccatcctccctgtctgcatctgtaggagacagagtcaccatcacttgccgggcaagtcagagcattagcagctatttaaattggtatcagcagaaaccagggaaagcccctaagctcctgatctatgctgcatccagtttgcaaagtggggtcccatcaaggttcagtggcagtggatgcggtacagatttcactctcaccatcagcagtctgcaacctgaagattttgcaacttactactgtcagcaaagctacatcgccccttacacttttggcggagggaccaaggttgagatcaaaggtggaggcggttcgggtggagggggatctggtggcggaggtagcggtggcgggggatcaggtggcgggggatcaggtggcgggggatcaggtggcgggggatcaggtggcgggggatcaggtggcgggggatcaggtggcgggggatcaggtggcgggggatcacccgctgctctgctgcctgcccggggtaccaacatggcccagaagcgtcctgcctgcaccctgaagcctgagtgtgtccagcagctgctggtttgctcccaggaggccaagaagtcagcctactgcccctacagtcactttcctgtgggggctgccctgctcacccaggaggggagaatcttcaaagggtgcaacatagaaaatgcctgctacccgctgggcatctgtgctgaacggaccgctatccagaaggccgtctcagaagggtacaaggatttcagggcaattgctatcgccagtgacatgcaagatgattttatctctccatgtggggcctgcaggcaagtcatgagagagtttggcaccaactggcccgtgtacatgaccaagccggatggtacgtatattcaccatcatcatcaccat

SEQ ID NO: 541 - DNA, 1335 bp, synthetic construct
  source 1..1335: mol_type = other DNA
gaggtgcagctggtggagtctgggggaggcttggtccagcctggagggtccctgagactctcctgtgcagcctctggattcaccttcgtagaccacgacatggactgggtccgccaggctccagggaaggggctggagtgggttggccgtactagaaacaaactaggaagttacaccacagaatacgccgcgtctgtgaaaggcagattcaccatctcaagagatgattcaaagaactcactgtatctgcaaatgaacagcctgaaaaccgaggacacggcggtgtactactgcgccagagagcctaaatactggatcgacttcgacctatgggggagaggtaccttggtcaccgtctcctcaggagggggcggatcaggcggaggtggatcgggagggggtggtagcgacatccagatgacccagtctccatcctccctgtctgcatctgtaggagacagagtcaccatcacttgccgggcaagtcagagcattagcagctatttaaattggtatcagcagaaaccagggaaagcccctaagctcctgatctatgctgcatccagtttgcaaagtggggtcccatcaaggttcagtggcagtggatgcggtacagatttcactctcaccatcagcagtctgcaacctgaagattttgcaacttactactgtcagcaaagctacatcgccccttacacttttggcggagggaccaaggttgagatcaaaggtggaggcggttcgggtggagggggatctggtggcggaggtagcggtggcgggggatcaggtggcgggggatcaggtggcgggggatcaggtggcgggggatcaggtggcgggggatcaggtggcgggggatcaggtggcgggggatcaggtggcgggggatcaggtggcgggggatcacccgctgctctgctgcctgcccggggtaccaacatggcccagaagcgtcctgcctgcaccctgaagcctgagtgtgtccagcagctgctggtttgctcccaggaggccaagaagtcagcctactgcccctacagtcactttcctgtgggggctgccctgctcacccaggaggggagaatcttcaaagggtgcaacatagaaaatgcctgctacccgctgggcatctgtgctgaacggaccgctatccagaaggccgtctcagaagggtacaaggatttcagggcaattgctatcgccagtgacatgcaagatgattttatctctccatgtggggcctgcaggcaagtcatgagagagtttggcaccaactggcccgtgtacatgaccaagccggatggtacgtatattcaccatcatcatcaccat

SEQ ID NO: 542 - DNA, 1176 bp, synthetic construct
  source 1..1176: mol_type = other DNA
gaggtgcagctgttggagtctgggggaggcttggtacagcctggggggtccctgagactctcctgtgcagcctctggattcacctttagcaattatgccatgagctgggtccgccaggctccagggaaggggctggagtgggtctcagctattagtggtagtggtggtagcacatactacgcagactccgtgaagggccggttcaccatctccagagacaattccaagaacacgctgtatctgcaaatgaacagcctgagagccgaggacacggcggtgtactactgcgccaagggccctcctacataccacacaaactactactacatggacgtatggggcaagggtacaactgtcaccgtctcctcaggagggggcggatcaggcggaggtggatcgggagggggtggtagcgacatccagatgacccagtctccatcttccgtgtctgcatctgtaggagacagagtcaccatcacttgtcgggcgagtcagggtattagcagctggttagcctggtatcagcagaaaccagggaaagcccctaagctcctgatctatgctgcatccagtttgcaaagtggggtcccatcaaggttcagcggcagtggatctgggacagatttcactctcaccatcagcagcctgcagcctgaagattttgcaacttattactgtcagcaaacaaatagtttcccttacacttttggcggagggaccaaggttgagatcaaaggtggcgggggatcacccgctgctctgctgcctgcccggggtaccaacatggcccagaagcgtcctgcctgcaccctgaagcctgagtgtgtccagcagctgctggtttgctcccaggaggccaagaagtcagcctactgcccctacagtcactttcctgtgggggctgccctgctcacccaggaggggagaatcttcaaagggtgcaacatagaaaatgcctgctacccgctgggcatctgtgctgaacggaccgctatccagaaggccgtctcagaagggtacaaggatttcagggcaattgctatcgccagtgacatgcaagatgattttatctctccatgtggggcctgcaggcaagtcatgagagagtttggcaccaactggcccgtgtacatgaccaagccggatggtacgtatattcaccatcatcatcaccat

SEQ ID NO: 543 - DNA, 1206 bp, synthetic construct
  source 1..1206: mol_type = other DNA
gaggtgcagctgttggagtctgggggaggcttggtacagcctggggggtccctgagactctcctgtgcagcctctggattcacctttagcaattatgccatgagctgggtccgccaggctccagggaaggggctggagtgggtctcagctattagtggtagtggtggtagcacatactacgcagactccgtgaagggccggttcaccatctccagagacaattccaagaacacgctgtatctgcaaatgaacagcctgagagccgaggacacggcggtgtactactgcgccaagggccctcctacataccacacaaactactactacatggacgtatggggcaagggtacaactgtcaccgtctcctcaggagggggcggatcaggcggaggtggatcgggagggggtggtagcgacatccagatgacccagtctccatcttccgtgtctgcatctgtaggagacagagtcaccatcacttgtcgggcgagtcagggtattagcagctggttagcctggtatcagcagaaaccagggaaagcccctaagctcctgatctatgctgcatccagtttgcaaagtggggtcccatcaaggttcagcggcagtggatctgggacagatttcactctcaccatcagcagcctgcagcctgaagattttgcaacttattactgtcagcaaacaaatagtttcccttacacttttggcggagggaccaaggttgagatcaaaggagggggcggatcaggcggaggtggatcgggagggggtggtagccccgctgctctgctgcctgcccggggtaccaacatggcccagaagcgtcctgcctgcaccctgaagcctgagtgtgtccagcagctgctggtttgctcccaggaggccaagaagtcagcctactgcccctacagtcactttcctgtgggggctgccctgctcacccaggaggggagaatcttcaaagggtgcaacatagaaaatgcctgctacccgctgggcatctgtgctgaacggaccgctatccagaaggccgtctcagaagggtacaaggatttcagggcaattgctatcgccagtgacatgcaagatgattttatctctccatgtggggcctgcaggcaagtcatgagagagtttggcaccaactggcccgtgtacatgaccaagccggatggtacgtatattcaccatcatcatcaccat

SEQ ID NO: 544 - DNA, 1221 bp, synthetic construct
  source 1..1221: mol_type = other DNA
gaggtgcagctgttggagtctgggggaggcttggtacagcctggggggtccctgagactctcctgtgcagcctctggattcacctttagcaattatgccatgagctgggtccgccaggctccagggaaggggctggagtgggtctcagctattagtggtagtggtggtagcacatactacgcagactccgtgaagggccggttcaccatctccagagacaattccaagaacacgctgtatctgcaaatgaacagcctgagagccgaggacacggcggtgtactactgcgccaagggccctcctacataccacacaaactactactacatggacgtatggggcaagggtacaactgtcaccgtctcctcaggagggggcggatcaggcggaggtggatcgggagggggtggtagcgacatccagatgacccagtctccatcttccgtgtctgcatctgtaggagacagagtcaccatcacttgtcgggcgagtcagggtattagcagctggttagcctggtatcagcagaaaccagggaaagcccctaagctcctgatctatgctgcatccagtttgcaaagtggggtcccatcaaggttcagcggcagtggatctgggacagatttcactctcaccatcagcagcctgcagcctgaagattttgcaacttattactgtcagcaaacaaatagtttcccttacacttttggcggagggaccaaggttgagatcaaaggtggaggcggttcgggtggagggggatctggtggcggaggtagcggtggcgggggatcacccgctgctctgctgcctgcccggggtaccaacatggcccagaagcgtcctgcctgcaccctgaagcctgagtgtgtccagcagctgctggtttgctcccaggaggccaagaagtcagcctactgcccctacagtcactttcctgtgggggctgccctgctcacccaggaggggagaatcttcaaagggtgcaacatagaaaatgcctgctacccgctgggcatctgtgctgaacggaccgctatccagaaggccgtctcagaagggtacaaggatttcagggcaattgctatcgccagtgacatgcaagatgattttatctctccatgtggggcctgcaggcaagtcatgagagagtttggcaccaactggcccgtgtacatgaccaagccggatggtacgtatattcaccatcatcatcaccat

SEQ ID NO: 545 - DNA, 1236 bp, synthetic construct
  source 1..1236: mol_type = other DNA
gaggtgcagctgttggagtctgggggaggcttggtacagcctggggggtccctgagactctcctgtgcagcctctggattcacctttagcaattatgccatgagctgggtccgccaggctccagggaaggggctggagtgggtctcagctattagtggtagtggtggtagcacatactacgcagactccgtgaagggccggttcaccatctccagagacaattccaagaacacgctgtatctgcaaatgaacagcctgagagccgaggacacggcggtgtactactgcgccaagggccctcctacataccacacaaactactactacatggacgtatggggcaagggtacaactgtcaccgtctcctcaggagggggcggatcaggcggaggtggatcgggagggggtggtagcgacatccagatgacccagtctccatcttccgtgtctgcatctgtaggagacagagtcaccatcacttgtcgggcgagtcagggtattagcagctggttagcctggtatcagcagaaaccagggaaagcccctaagctcctgatctatgctgcatccagtttgcaaagtggggtcccatcaaggttcagcggcagtggatctgggacagatttcactctcaccatcagcagcctgcagcctgaagattttgcaacttattactgtcagcaaacaaatagtttcccttacacttttggcggagggaccaaggttgagatcaaaggtggaggcggttcgggtggagggggatctggtggcggaggtagcggtggcgggggatcaggtggcgggggatcacccgctgctctgctgcctgcccggggtaccaacatggcccagaagcgtcctgcctgcaccctgaagcctgagtgtgtccagcagctgctggtttgctcccaggaggccaagaagtcagcctactgcccctacagtcactttcctgtgggggctgccctgctcacccaggaggggagaatcttcaaagggtgcaacatagaaaatgcctgctacccgctgggcatctgtgctgaacggaccgctatccagaaggccgtctcagaagggtacaaggatttcagggcaattgctatcgccagtgacatgcaagatgattttatctctccatgtggggcctgcaggcaagtcatgagagagtttggcaccaactggcccgtgtacatgaccaagccggatggtacgtatattcaccatcatcatcaccat

SEQ ID NO: 546 - DNA, 1251 bp, synthetic construct
  source 1..1251: mol_type = other DNA
gaggtgcagctgttggagtctgggggaggcttggtacagcctggggggtccctgagactctcctgtgcagcctctggattcacctttagcaattatgccatgagctgggtccgccaggctccagggaaggggctggagtgggtctcagctattagtggtagtggtggtagcacatactacgcagactccgtgaagggccggttcaccatctccagagacaattccaagaacacgctgtatctgcaaatgaacagcctgagagccgaggacacggcggtgtactactgcgccaagggccctcctacataccacacaaactactactacatggacgtatggggcaagggtacaactgtcaccgtctcctcaggagggggcggatcaggcggaggtggatcgggagggggtggtagcgacatccagatgacccagtctccatcttccgtgtctgcatctgtaggagacagagtcaccatcacttgtcgggcgagtcagggtattagcagctggttagcctggtatcagcagaaaccagggaaagcccctaagctcctgatctatgctgcatccagtttgcaaagtggggtcccatcaaggttcagcggcagtggatctgggacagatttcactctcaccatcagcagcctgcagcctgaagattttgcaacttattactgtcagcaaacaaatagtttcccttacacttttggcggagggaccaaggttgagatcaaaggtggaggcggttcgggtggagggggatctggtggcggaggtagcggtggcgggggatcaggtggcgggggatcaggtggcgggggatcacccgctgctctgctgcctgcccggggtaccaacatggcccagaagcgtcctgcctgcaccctgaagcctgagtgtgtccagcagctgctggtttgctcccaggaggccaagaagtcagcctactgcccctacagtcactttcctgtgggggctgccctgctcacccaggaggggagaatcttcaaagggtgcaacatagaaaatgcctgctacccgctgggcatctgtgctgaacggaccgctatccagaaggccgtctcagaagggtacaaggatttcagggcaattgctatcgccagtgacatgcaagatgattttatctctccatgtggggcctgcaggcaagtcatgagagagtttggcaccaactggcccgtgtacatgaccaagccggatggtacgtatattcaccatcatcatcaccat

SEQ ID NO: 547 - DNA, 1266 bp, synthetic construct
  source 1..1266: mol_type = other DNA
gaggtgcagctgttggagtctgggggaggcttggtacagcctggggggtccctgagactctcctgtgcagcctctggattcacctttagcaattatgccatgagctgggtccgccaggctccagggaaggggctggagtgggtctcagctattagtggtagtggtggtagcacatactacgcagactccgtgaagggccggttcaccatctccagagacaattccaagaacacgctgtatctgcaaatgaacagcctgagagccgaggacacggcggtgtactactgcgccaagggccctcctacataccacacaaactactactacatggacgtatggggcaagggtacaactgtcaccgtctcctcaggagggggcggatcaggcggaggtggatcgggagggggtggtagcgacatccagatgacccagtctccatcttccgtgtctgcatctgtaggagacagagtcaccatcacttgtcgggcgagtcagggtattagcagctggttagcctggtatcagcagaaaccagggaaagcccctaagctcctgatctatgctgcatccagtttgcaaagtggggtcccatcaaggttcagcggcagtggatctgggacagatttcactctcaccatcagcagcctgcagcctgaagattttgcaacttattactgtcagcaaacaaatagtttcccttacacttttggcggagggaccaaggttgagatcaaaggtggaggcggttcgggtggagggggatctggtggcggaggtagcggtggcgggggatcaggtggcgggggatcaggtggcgggggatcaggtggcgggggatcacccgctgctctgctgcctgcccggggtaccaacatggcccagaagcgtcctgcctgcaccctgaagcctgagtgtgtccagcagctgctggtttgctcccaggaggccaagaagtcagcctactgcccctacagtcactttcctgtgggggctgccctgctcacccaggaggggagaatcttcaaagggtgcaacatagaaaatgcctgctacccgctgggcatctgtgctgaacggaccgctatccagaaggccgtctcagaagggtacaaggatttcagggcaattgctatcgccagtgacatgcaagatgattttatctctccatgtggggcctgcaggcaagtcatgagagagtttggcaccaactggcccgtgtacatgaccaagccggatggtacgtatattcaccatcatcatcaccat

SEQ ID NO: 548 - DNA, 1281 bp, synthetic construct
  source 1..1281: mol_type = other DNA
gaggtgcagctgttggagtctgggggaggcttggtacagcctggggggtccctgagactctcctgtgcagcctctggattcacctttagcaattatgccatgagctgggtccgccaggctccagggaaggggctggagtgggtctcagctattagtggtagtggtggtagcacatactacgcagactccgtgaagggccggttcaccatctccagagacaattccaagaacacgctgtatctgcaaatgaacagcctgagagccgaggacacggcggtgtactactgcgccaagggccctcctacataccacacaaactactactacatggacgtatggggcaagggtacaactgtcaccgtctcctcaggagggggcggatcaggcggaggtggatcgggagggggtggtagcgacatccagatgacccagtctccatcttccgtgtctgcatctgtaggagacagagtcaccatcacttgtcgggcgagtcagggtattagcagctggttagcctggtatcagcagaaaccagggaaagcccctaagctcctgatctatgctgcatccagtttgcaaagtggggtcccatcaaggttcagcggcagtggatctgggacagatttcactctcaccatcagcagcctgcagcctgaagattttgcaacttattactgtcagcaaacaaatagtttcccttacacttttggcggagggaccaaggttgagatcaaaggtggaggcggttcgggtggagggggatctggtggcggaggtagcggtggcgggggatcaggtggcgggggatcaggtggcgggggatcaggtggcgggggatcaggtggcgggggatcacccgctgctctgctgcctgcccggggtaccaacatggcccagaagcgtcctgcctgcaccctgaagcctgagtgtgtccagcagctgctggtttgctcccaggaggccaagaagtcagcctactgcccctacagtcactttcctgtgggggctgccctgctcacccaggaggggagaatcttcaaagggtgcaacatagaaaatgcctgctacccgctgggcatctgtgctgaacggaccgctatccagaaggccgtctcagaagggtacaaggatttcagggcaattgctatcgccagtgacatgcaagatgattttatctctccatgtggggcctgcaggcaagtcatgagagagtttggcaccaactggcccgtgtacatgaccaagccggatggtacgtatattcaccatcatcatcaccat

SEQ ID NO: 549 - DNA, 1296 bp, synthetic construct
  source 1..1296: mol_type = other DNA
gaggtgcagctgttggagtctgggggaggcttggtacagcctggggggtccctgagactctcctgtgcagcctctggattcacctttagcaattatgccatgagctgggtccgccaggctccagggaaggggctggagtgggtctcagctattagtggtagtggtggtagcacatactacgcagactccgtgaagggccggttcaccatctccagagacaattccaagaacacgctgtatctgcaaatgaacagcctgagagccgaggacacggcggtgtactactgcgccaagggccctcctacataccacacaaactactactacatggacgtatggggcaagggtacaactgtcaccgtctcctcaggagggggcggatcaggcggaggtggatcgggagggggtggtagcgacatccagatgacccagtctccatcttccgtgtctgcatctgtaggagacagagtcaccatcacttgtcgggcgagtcagggtattagcagctggttagcctggtatcagcagaaaccagggaaagcccctaagctcctgatctatgctgcatccagtttgcaaagtggggtcccatcaaggttcagcggcagtggatctgggacagatttcactctcaccatcagcagcctgcagcctgaagattttgcaacttattactgtcagcaaacaaatagtttcccttacacttttggcggagggaccaaggttgagatcaaaggtggaggcggttcgggtggagggggatctggtggcggaggtagcggtggcgggggatcaggtggcgggggatcaggtggcgggggatcaggtggcgggggatcaggtggcgggggatcaggtggcgggggatcacccgctgctctgctgcctgcccggggtaccaacatggcccagaagcgtcctgcctgcaccctgaagcctgagtgtgtccagcagctgctggtttgctcccaggaggccaagaagtcagcctactgcccctacagtcactttcctgtgggggctgccctgctcacccaggaggggagaatcttcaaagggtgcaacatagaaaatgcctgctacccgctgggcatctgtgctgaacggaccgctatccagaaggccgtctcagaagggtacaaggatttcagggcaattgctatcgccagtgacatgcaagatgattttatctctccatgtggggcctgcaggcaagtcatgagagagtttggcaccaactggcccgtgtacatgaccaagccggatggtacgtatattcaccatcatcatcaccat

SEQ ID NO: 550 - DNA, 1311 bp, synthetic construct
  source 1..1311: mol_type = other DNA
gaggtgcagctgttggagtctgggggaggcttggtacagcctggggggtccctgagactctcctgtgcagcctctggattcacctttagcaattatgccatgagctgggtccgccaggctccagggaaggggctggagtgggtctcagctattagtggtagtggtggtagcacatactacgcagactccgtgaagggccggttcaccatctccagagacaattccaagaacacgctgtatctgcaaatgaacagcctgagagccgaggacacggcggtgtactactgcgccaagggccctcctacataccacacaaactactactacatggacgtatggggcaagggtacaactgtcaccgtctcctcaggagggggcggatcaggcggaggtggatcgggagggggtggtagcgacatccagatgacccagtctccatcttccgtgtctgcatctgtaggagacagagtcaccatcacttgtcgggcgagtcagggtattagcagctggttagcctggtatcagcagaaaccagggaaagcccctaagctcctgatctatgctgcatccagtttgcaaagtggggtcccatcaaggttcagcggcagtggatctgggacagatttcactctcaccatcagcagcctgcagcctgaagattttgcaacttattactgtcagcaaacaaatagtttcccttacacttttggcggagggaccaaggttgagatcaaaggtggaggcggttcgggtggagggggatctggtggcggaggtagcggtggcgggggatcaggtggcgggggatcaggtggcgggggatcaggtggcgggggatcaggtggcgggggatcaggtggcgggggatcaggtggcgggggatcacccgctgctctgctgcctgcccggggtaccaacatggcccagaagcgtcctgcctgcaccctgaagcctgagtgtgtccagcagctgctggtttgctcccaggaggccaagaagtcagcctactgcccctacagtcactttcctgtgggggctgccctgctcacccaggaggggagaatcttcaaagggtgcaacatagaaaatgcctgctacccgctgggcatctgtgctgaacggaccgctatccagaaggccgtctcagaagggtacaaggatttcagggcaattgctatcgccagtgacatgcaagatgattttatctctccatgtggggcctgcaggcaagtcatgagagagtttggcaccaactggcccgtgtacatgaccaagccggatggtacgtatattcaccatcatcatcaccat

SEQ ID NO: 551 - DNA, 1326 bp, synthetic construct
  source 1..1326: mol_type = other DNA
gaggtgcagctgttggagtctgggggaggcttggtacagcctggggggtccctgagactctcctgtgcagcctctggattcacctttagcaattatgccatgagctgggtccgccaggctccagggaaggggctggagtgggtctcagctattagtggtagtggtggtagcacatactacgcagactccgtgaagggccggttcaccatctccagagacaattccaagaacacgctgtatctgcaaatgaacagcctgagagccgaggacacggcggtgtactactgcgccaagggccctcctacataccacacaaactactactacatggacgtatggggcaagggtacaactgtcaccgtctcctcaggagggggcggatcaggcggaggtggatcgggagggggtggtagcgacatccagatgacccagtctccatcttccgtgtctgcatctgtaggagacagagtcaccatcacttgtcgggcgagtcagggtattagcagctggttagcctggtatcagcagaaaccagggaaagcccctaagctcctgatctatgctgcatccagtttgcaaagtggggtcccatcaaggttcagcggcagtggatctgggacagatttcactctcaccatcagcagcctgcagcctgaagattttgcaacttattactgtcagcaaacaaatagtttcccttacacttttggcggagggaccaaggttgagatcaaaggtggaggcggttcgggtggagggggatctggtggcggaggtagcggtggcgggggatcaggtggcgggggatcaggtggcgggggatcaggtggcgggggatcaggtggcgggggatcaggtggcgggggatcaggtggcgggggatcaggtggcgggggatcacccgctgctctgctgcctgcccggggtaccaacatggcccagaagcgtcctgcctgcaccctgaagcctgagtgtgtccagcagctgctggtttgctcccaggaggccaagaagtcagcctactgcccctacagtcactttcctgtgggggctgccctgctcacccaggaggggagaatcttcaaagggtgcaacatagaaaatgcctgctacccgctgggcatctgtgctgaacggaccgctatccagaaggccgtctcagaagggtacaaggatttcagggcaattgctatcgccagtgacatgcaagatgattttatctctccatgtggggcctgcaggcaagtcatgagagagtttggcaccaactggcccgtgtacatgaccaagccggatggtacgtatattcaccatcatcatcaccat

SEQ ID NO: 552 - DNA, 1341 bp, synthetic construct
  source 1..1341: mol_type = other DNA
gaggtgcagctgttggagtctgggggaggcttggtacagcctggggggtccctgagactctcctgtgcagcctctggattcacctttagcaattatgccatgagctgggtccgccaggctccagggaaggggctggagtgggtctcagctattagtggtagtggtggtagcacatactacgcagactccgtgaagggccggttcaccatctccagagacaattccaagaacacgctgtatctgcaaatgaacagcctgagagccgaggacacggcggtgtactactgcgccaagggccctcctacataccacacaaactactactacatggacgtatggggcaagggtacaactgtcaccgtctcctcaggagggggcggatcaggcggaggtggatcgggagggggtggtagcgacatccagatgacccagtctccatcttccgtgtctgcatctgtaggagacagagtcaccatcacttgtcgggcgagtcagggtattagcagctggttagcctggtatcagcagaaaccagggaaagcccctaagctcctgatctatgctgcatccagtttgcaaagtggggtcccatcaaggttcagcggcagtggatctgggacagatttcactctcaccatcagcagcctgcagcctgaagattttgcaacttattactgtcagcaaacaaatagtttcccttacacttttggcggagggaccaaggttgagatcaaaggtggaggcggttcgggtggagggggatctggtggcggaggtagcggtggcgggggatcaggtggcgggggatcaggtggcgggggatcaggtggcgggggatcaggtggcgggggatcaggtggcgggggatcaggtggcgggggatcaggtggcgggggatcaggtggcgggggatcacccgctgctctgctgcctgcccggggtaccaacatggcccagaagcgtcctgcctgcaccctgaagcctgagtgtgtccagcagctgctggtttgctcccaggaggccaagaagtcagcctactgcccctacagtcactttcctgtgggggctgccctgctcacccaggaggggagaatcttcaaagggtgcaacatagaaaatgcctgctacccgctgggcatctgtgctgaacggaccgctatccagaaggccgtctcagaagggtacaaggatttcagggcaattgctatcgccagtgacatgcaagatgattttatctctccatgtggggcctgcaggcaagtcatgagagagtttggcaccaactggcccgtgtacatgaccaagccggatggtacgtatattcaccatcatcatcaccat

SEQ ID NO: 553 - DNA, 1176 bp, synthetic construct
  source 1..1176: mol_type = other DNA
gaggtgcagctgttggagtctgggggaggcttggtacagcctggggggtccctgagactctcctgtgcagcctctggattcacctttagcagctatgtcatgatctgggtccgccaggctccagggaaggggctggagtgggtctcaagcattagtggtgacagcgtaacaacatactacgcagactccgtgaagggccggttcaccatctccagagacaattccaagaacacgctgtatctgcaaatgaacagcctgagagccgaggacacggcggtgtactactgcgccaagggccctcctacataccacacaaactactactacatggacgtatggggcaagggtacaactgtcaccgtctcctcaggagggggcggatcaggcggaggtggatcgggagggggtggtagcgacatccagatgacccagtctccatcttccgtgtctgcatctgtaggagacagagtcaccatcacttgtcgggcgagtcagggtattagcagctggttagcctggtatcagcagaaaccagggaaagcccctaagctcctgatctatgctgcatccagtttgcaaagtggggtcccatcaaggttcagcggcagtggatctgggacagatttcactctcaccatcagcagcctgcagcctgaagattttgcaacttattactgtcagcaaacaaatagtttcccttacacttttggcggagggaccaaggttgagatcaaaggtggcgggggatcacccgctgctctgctgcctgcccggggtaccaacatggcccagaagcgtcctgcctgcaccctgaagcctgagtgtgtccagcagctgctggtttgctcccaggaggccaagaagtcagcctactgcccctacagtcactttcctgtgggggctgccctgctcacccaggaggggagaatcttcaaagggtgcaacatagaaaatgcctgctacccgctgggcatctgtgctgaacggaccgctatccagaaggccgtctcagaagggtacaaggatttcagggcaattgctatcgccagtgacatgcaagatgattttatctctccatgtggggcctgcaggcaagtcatgagagagtttggcaccaactggcccgtgtacatgaccaagccggatggtacgtatattcaccatcatcatcaccat

SEQ ID NO: 554 - DNA, 1206 bp, synthetic construct
  source 1..1206: mol_type = other DNA
gaggtgcagctgttggagtctgggggaggcttggtacagcctggggggtccctgagactctcctgtgcagcctctggattcacctttagcagctatgtcatgatctgggtccgccaggctccagggaaggggctggagtgggtctcaagcattagtggtgacagcgtaacaacatactacgcagactccgtgaagggccggttcaccatctccagagacaattccaagaacacgctgtatctgcaaatgaacagcctgagagccgaggacacggcggtgtactactgcgccaagggccctcctacataccacacaaactactactacatggacgtatggggcaagggtacaactgtcaccgtctcctcaggagggggcggatcaggcggaggtggatcgggagggggtggtagcgacatccagatgacccagtctccatcttccgtgtctgcatctgtaggagacagagtcaccatcacttgtcgggcgagtcagggtattagcagctggttagcctggtatcagcagaaaccagggaaagcccctaagctcctgatctatgctgcatccagtttgcaaagtggggtcccatcaaggttcagcggcagtggatctgggacagatttcactctcaccatcagcagcctgcagcctgaagattttgcaacttattactgtcagcaaacaaatagtttcccttacacttttggcggagggaccaaggttgagatcaaaggagggggcggatcaggcggaggtggatcgggagggggtggtagccccgctgctctgctgcctgcccggggtaccaacatggcccagaagcgtcctgcctgcaccctgaagcctgagtgtgtccagcagctgctggtttgctcccaggaggccaagaagtcagcctactgcccctacagtcactttcctgtgggggctgccctgctcacccaggaggggagaatcttcaaagggtgcaacatagaaaatgcctgctacccgctgggcatctgtgctgaacggaccgctatccagaaggccgtctcagaagggtacaaggatttcagggcaattgctatcgccagtgacatgcaagatgattttatctctccatgtggggcctgcaggcaagtcatgagagagtttggcaccaactggcccgtgtacatgaccaagccggatggtacgtatattcaccatcatcatcaccat

SEQ ID NO: 555 - DNA, 1221 bp, synthetic construct
  source 1..1221: mol_type = other DNA
gaggtgcagctgttggagtctgggggaggcttggtacagcctggggggtccctgagactctcctgtgcagcctctggattcacctttagcagctatgtcatgatctgggtccgccaggctccagggaaggggctggagtgggtctcaagcattagtggtgacagcgtaacaacatactacgcagactccgtgaagggccggttcaccatctccagagacaattccaagaacacgctgtatctgcaaatgaacagcctgagagccgaggacacggcggtgtactactgcgccaagggccctcctacataccacacaaactactactacatggacgtatggggcaagggtacaactgtcaccgtctcctcaggagggggcggatcaggcggaggtggatcgggagggggtggtagcgacatccagatgacccagtctccatcttccgtgtctgcatctgtaggagacagagtcaccatcacttgtcgggcgagtcagggtattagcagctggttagcctggtatcagcagaaaccagggaaagcccctaagctcctgatctatgctgcatccagtttgcaaagtggggtcccatcaaggttcagcggcagtggatctgggacagatttcactctcaccatcagcagcctgcagcctgaagattttgcaacttattactgtcagcaaacaaatagtttcccttacacttttggcggagggaccaaggttgagatcaaaggtggaggcggttcgggtggagggggatctggtggcggaggtagcggtggcgggggatcacccgctgctctgctgcctgcccggggtaccaacatggcccagaagcgtcctgcctgcaccctgaagcctgagtgtgtccagcagctgctggtttgctcccaggaggccaagaagtcagcctactgcccctacagtcactttcctgtgggggctgccctgctcacccaggaggggagaatcttcaaagggtgcaacatagaaaatgcctgctacccgctgggcatctgtgctgaacggaccgctatccagaaggccgtctcagaagggtacaaggatttcagggcaattgctatcgccagtgacatgcaagatgattttatctctccatgtggggcctgcaggcaagtcatgagagagtttggcaccaactggcccgtgtacatgaccaagccggatggtacgtatattcaccatcatcatcaccat

SEQ ID NO: 556 - DNA, 1236 bp, synthetic construct
  source 1..1236: mol_type = other DNA
gaggtgcagctgttggagtctgggggaggcttggtacagcctggggggtccctgagactctcctgtgcagcctctggattcacctttagcagctatgtcatgatctgggtccgccaggctccagggaaggggctggagtgggtctcaagcattagtggtgacagcgtaacaacatactacgcagactccgtgaagggccggttcaccatctccagagacaattccaagaacacgctgtatctgcaaatgaacagcctgagagccgaggacacggcggtgtactactgcgccaagggccctcctacataccacacaaactactactacatggacgtatggggcaagggtacaactgtcaccgtctcctcaggagggggcggatcaggcggaggtggatcgggagggggtggtagcgacatccagatgacccagtctccatcttccgtgtctgcatctgtaggagacagagtcaccatcacttgtcgggcgagtcagggtattagcagctggttagcctggtatcagcagaaaccagggaaagcccctaagctcctgatctatgctgcatccagtttgcaaagtggggtcccatcaaggttcagcggcagtggatctgggacagatttcactctcaccatcagcagcctgcagcctgaagattttgcaacttattactgtcagcaaacaaatagtttcccttacacttttggcggagggaccaaggttgagatcaaaggtggaggcggttcgggtggagggggatctggtggcggaggtagcggtggcgggggatcaggtggcgggggatcacccgctgctctgctgcctgcccggggtaccaacatggcccagaagcgtcctgcctgcaccctgaagcctgagtgtgtccagcagctgctggtttgctcccaggaggccaagaagtcagcctactgcccctacagtcactttcctgtgggggctgccctgctcacccaggaggggagaatcttcaaagggtgcaacatagaaaatgcctgctacccgctgggcatctgtgctgaacggaccgctatccagaaggccgtctcagaagggtacaaggatttcagggcaattgctatcgccagtgacatgcaagatgattttatctctccatgtggggcctgcaggcaagtcatgagagagtttggcaccaactggcccgtgtacatgaccaagccggatggtacgtatattcaccatcatcatcaccat

SEQ ID NO: 557 - DNA, 1251 bp, synthetic construct
  source 1..1251: mol_type = other DNA
gaggtgcagctgttggagtctgggggaggcttggtacagcctggggggtccctgagactctcctgtgcagcctctggattcacctttagcagctatgtcatgatctgggtccgccaggctccagggaaggggctggagtgggtctcaagcattagtggtgacagcgtaacaacatactacgcagactccgtgaagggccggttcaccatctccagagacaattccaagaacacgctgtatctgcaaatgaacagcctgagagccgaggacacggcggtgtactactgcgccaagggccctcctacataccacacaaactactactacatggacgtatggggcaagggtacaactgtcaccgtctcctcaggagggggcggatcaggcggaggtggatcgggagggggtggtagcgacatccagatgacccagtctccatcttccgtgtctgcatctgtaggagacagagtcaccatcacttgtcgggcgagtcagggtattagcagctggttagcctggtatcagcagaaaccagggaaagcccctaagctcctgatctatgctgcatccagtttgcaaagtggggtcccatcaaggttcagcggcagtggatctgggacagatttcactctcaccatcagcagcctgcagcctgaagattttgcaacttattactgtcagcaaacaaatagtttcccttacacttttggcggagggaccaaggttgagatcaaaggtggaggcggttcgggtggagggggatctggtggcggaggtagcggtggcgggggatcaggtggcgggggatcaggtggcgggggatcacccgctgctctgctgcctgcccggggtaccaacatggcccagaagcgtcctgcctgcaccctgaagcctgagtgtgtccagcagctgctggtttgctcccaggaggccaagaagtcagcctactgcccctacagtcactttcctgtgggggctgccctgctcacccaggaggggagaatcttcaaagggtgcaacatagaaaatgcctgctacccgctgggcatctgtgctgaacggaccgctatccagaaggccgtctcagaagggtacaaggatttcagggcaattgctatcgccagtgacatgcaagatgattttatctctccatgtggggcctgcaggcaagtcatgagagagtttggcaccaactggcccgtgtacatgaccaagccggatggtacgtatattcaccatcatcatcaccat

SEQ ID NO: 558 - DNA, 1266 bp, synthetic construct
  source 1..1266: mol_type = other DNA
gaggtgcagctgttggagtctgggggaggcttggtacagcctggggggtccctgagactctcctgtgcagcctctggattcacctttagcagctatgtcatgatctgggtccgccaggctccagggaaggggctggagtgggtctcaagcattagtggtgacagcgtaacaacatactacgcagactccgtgaagggccggttcaccatctccagagacaattccaagaacacgctgtatctgcaaatgaacagcctgagagccgaggacacggcggtgtactactgcgccaagggccctcctacataccacacaaactactactacatggacgtatggggcaagggtacaactgtcaccgtctcctcaggagggggcggatcaggcggaggtggatcgggagggggtggtagcgacatccagatgacccagtctccatcttccgtgtctgcatctgtaggagacagagtcaccatcacttgtcgggcgagtcagggtattagcagctggttagcctggtatcagcagaaaccagggaaagcccctaagctcctgatctatgctgcatccagtttgcaaagtggggtcccatcaaggttcagcggcagtggatctgggacagatttcactctcaccatcagcagcctgcagcctgaagattttgcaacttattactgtcagcaaacaaatagtttcccttacacttttggcggagggaccaaggttgagatcaaaggtggaggcggttcgggtggagggggatctggtggcggaggtagcggtggcgggggatcaggtggcgggggatcaggtggcgggggatcaggtggcgggggatcacccgctgctctgctgcctgcccggggtaccaacatggcccagaagcgtcctgcctgcaccctgaagcctgagtgtgtccagcagctgctggtttgctcccaggaggccaagaagtcagcctactgcccctacagtcactttcctgtgggggctgccctgctcacccaggaggggagaatcttcaaagggtgcaacatagaaaatgcctgctacccgctgggcatctgtgctgaacggaccgctatccagaaggccgtctcagaagggtacaaggatttcagggcaattgctatcgccagtgacatgcaagatgattttatctctccatgtggggcctgcaggcaagtcatgagagagtttggcaccaactggcccgtgtacatgaccaagccggatggtacgtatattcaccatcatcatcaccat

SEQ ID NO: 559 - DNA, 1281 bp, synthetic construct
  source 1..1281: mol_type = other DNA
gaggtgcagctgttggagtctgggggaggcttggtacagcctggggggtccctgagactctcctgtgcagcctctggattcacctttagcagctatgtcatgatctgggtccgccaggctccagggaaggggctggagtgggtctcaagcattagtggtgacagcgtaacaacatactacgcagactccgtgaagggccggttcaccatctccagagacaattccaagaacacgctgtatctgcaaatgaacagcctgagagccgaggacacggcggtgtactactgcgccaagggccctcctacataccacacaaactactactacatggacgtatggggcaagggtacaactgtcaccgtctcctcaggagggggcggatcaggcggaggtggatcgggagggggtggtagcgacatccagatgacccagtctccatcttccgtgtctgcatctgtaggagacagagtcaccatcacttgtcgggcgagtcagggtattagcagctggttagcctggtatcagcagaaaccagggaaagcccctaagctcctgatctatgctgcatccagtttgcaaagtggggtcccatcaaggttcagcggcagtggatctgggacagatttcactctcaccatcagcagcctgcagcctgaagattttgcaacttattactgtcagcaaacaaatagtttcccttacacttttggcggagggaccaaggttgagatcaaaggtggaggcggttcgggtggagggggatctggtggcggaggtagcggtggcgggggatcaggtggcgggggatcaggtggcgggggatcaggtggcgggggatcaggtggcgggggatcacccgctgctctgctgcctgcccggggtaccaacatggcccagaagcgtcctgcctgcaccctgaagcctgagtgtgtccagcagctgctggtttgctcccaggaggccaagaagtcagcctactgcccctacagtcactttcctgtgggggctgccctgctcacccaggaggggagaatcttcaaagggtgcaacatagaaaatgcctgctacccgctgggcatctgtgctgaacggaccgctatccagaaggccgtctcagaagggtacaaggatttcagggcaattgctatcgccagtgacatgcaagatgattttatctctccatgtggggcctgcaggcaagtcatgagagagtttggcaccaactggcccgtgtacatgaccaagccggatggtacgtatattcaccatcatcatcaccat

SEQ ID NO: 560 - DNA, 1296 bp, synthetic construct
  source 1..1296: mol_type = other DNA
gaggtgcagctgttggagtctgggggaggcttggtacagcctggggggtccctgagactctcctgtgcagcctctggattcacctttagcagctatgtcatgatctgggtccgccaggctccagggaaggggctggagtgggtctcaagcattagtggtgacagcgtaacaacatactacgcagactccgtgaagggccggttcaccatctccagagacaattccaagaacacgctgtatctgcaaatgaacagcctgagagccgaggacacggcggtgtactactgcgccaagggccctcctacataccacacaaactactactacatggacgtatggggcaagggtacaactgtcaccgtctcctcaggagggggcggatcaggcggaggtggatcgggagggggtggtagcgacatccagatgacccagtctccatcttccgtgtctgcatctgtaggagacagagtcaccatcacttgtcgggcgagtcagggtattagcagctggttagcctggtatcagcagaaaccagggaaagcccctaagctcctgatctatgctgcatccagtttgcaaagtggggtcccatcaaggttcagcggcagtggatctgggacagatttcactctcaccatcagcagcctgcagcctgaagattttgcaacttattactgtcagcaaacaaatagtttcccttacacttttggcggagggaccaaggttgagatcaaaggtggaggcggttcgggtggagggggatctggtggcggaggtagcggtggcgggggatcaggtggcgggggatcaggtggcgggggatcaggtggcgggggatcaggtggcgggggatcaggtggcgggggatcacccgctgctctgctgcctgcccggggtaccaacatggcccagaagcgtcctgcctgcaccctgaagcctgagtgtgtccagcagctgctggtttgctcccaggaggccaagaagtcagcctactgcccctacagtcactttcctgtgggggctgccctgctcacccaggaggggagaatcttcaaagggtgcaacatagaaaatgcctgctacccgctgggcatctgtgctgaacggaccgctatccagaaggccgtctcagaagggtacaaggatttcagggcaattgctatcgccagtgacatgcaagatgattttatctctccatgtggggcctgcaggcaagtcatgagagagtttggcaccaactggcccgtgtacatgaccaagccggatggtacgtatattcaccatcatcatcaccat

SEQ ID NO: 561 - DNA, 1311 bp, synthetic construct
  source 1..1311: mol_type = other DNA
gaggtgcagctgttggagtctgggggaggcttggtacagcctggggggtccctgagactctcctgtgcagcctctggattcacctttagcagctatgtcatgatctgggtccgccaggctccagggaaggggctggagtgggtctcaagcattagtggtgacagcgtaacaacatactacgcagactccgtgaagggccggttcaccatctccagagacaattccaagaacacgctgtatctgcaaatgaacagcctgagagccgaggacacggcggtgtactactgcgccaagggccctcctacataccacacaaactactactacatggacgtatggggcaagggtacaactgtcaccgtctcctcaggagggggcggatcaggcggaggtggatcgggagggggtggtagcgacatccagatgacccagtctccatcttccgtgtctgcatctgtaggagacagagtcaccatcacttgtcgggcgagtcagggtattagcagctggttagcctggtatcagcagaaaccagggaaagcccctaagctcctgatctatgctgcatccagtttgcaaagtggggtcccatcaaggttcagcggcagtggatctgggacagatttcactctcaccatcagcagcctgcagcctgaagattttgcaacttattactgtcagcaaacaaatagtttcccttacacttttggcggagggaccaaggttgagatcaaaggtggaggcggttcgggtggagggggatctggtggcggaggtagcggtggcgggggatcaggtggcgggggatcaggtggcgggggatcaggtggcgggggatcaggtggcgggggatcaggtggcgggggatcaggtggcgggggatcacccgctgctctgctgcctgcccggggtaccaacatggcccagaagcgtcctgcctgcaccctgaagcctgagtgtgtccagcagctgctggtttgctcccaggaggccaagaagtcagcctactgcccctacagtcactttcctgtgggggctgccctgctcacccaggaggggagaatcttcaaagggtgcaacatagaaaatgcctgctacccgctgggcatctgtgctgaacggaccgctatccagaaggccgtctcagaagggtacaaggatttcagggcaattgctatcgccagtgacatgcaagatgattttatctctccatgtggggcctgcaggcaagtcatgagagagtttggcaccaactggcccgtgtacatgaccaagccggatggtacgtatattcaccatcatcatcaccat

SEQ ID NO: 562 - DNA, 1326 bp, synthetic construct
  source 1..1326: mol_type = other DNA
gaggtgcagctgttggagtctgggggaggcttggtacagcctggggggtccctgagactctcctgtgcagcctctggattcacctttagcagctatgtcatgatctgggtccgccaggctccagggaaggggctggagtgggtctcaagcattagtggtgacagcgtaacaacatactacgcagactccgtgaagggccggttcaccatctccagagacaattccaagaacacgctgtatctgcaaatgaacagcctgagagccgaggacacggcggtgtactactgcgccaagggccctcctacataccacacaaactactactacatggacgtatggggcaagggtacaactgtcaccgtctcctcaggagggggcggatcaggcggaggtggatcgggagggggtggtagcgacatccagatgacccagtctccatcttccgtgtctgcatctgtaggagacagagtcaccatcacttgtcgggcgagtcagggtattagcagctggttagcctggtatcagcagaaaccagggaaagcccctaagctcctgatctatgctgcatccagtttgcaaagtggggtcccatcaaggttcagcggcagtggatctgggacagatttcactctcaccatcagcagcctgcagcctgaagattttgcaacttattactgtcagcaaacaaatagtttcccttacacttttggcggagggaccaaggttgagatcaaaggtggaggcggttcgggtggagggggatctggtggcggaggtagcggtggcgggggatcaggtggcgggggatcaggtggcgggggatcaggtggcgggggatcaggtggcgggggatcaggtggcgggggatcaggtggcgggggatcaggtggcgggggatcacccgctgctctgctgcctgcccggggtaccaacatggcccagaagcgtcctgcctgcaccctgaagcctgagtgtgtccagcagctgctggtttgctcccaggaggccaagaagtcagcctactgcccctacagtcactttcctgtgggggctgccctgctcacccaggaggggagaatcttcaaagggtgcaacatagaaaatgcctgctacccgctgggcatctgtgctgaacggaccgctatccagaaggccgtctcagaagggtacaaggatttcagggcaattgctatcgccagtgacatgcaagatgattttatctctccatgtggggcctgcaggcaagtcatgagagagtttggcaccaactggcccgtgtacatgaccaagccggatggtacgtatattcaccatcatcatcaccat

SEQ ID NO: 563 - DNA, 1341 bp, synthetic construct
  source 1..1341: mol_type = other DNA
gaggtgcagctgttggagtctgggggaggcttggtacagcctggggggtccctgagactctcctgtgcagcctctggattcacctttagcagctatgtcatgatctgggtccgccaggctccagggaaggggctggagtgggtctcaagcattagtggtgacagcgtaacaacatactacgcagactccgtgaagggccggttcaccatctccagagacaattccaagaacacgctgtatctgcaaatgaacagcctgagagccgaggacacggcggtgtactactgcgccaagggccctcctacataccacacaaactactactacatggacgtatggggcaagggtacaactgtcaccgtctcctcaggagggggcggatcaggcggaggtggatcgggagggggtggtagcgacatccagatgacccagtctccatcttccgtgtctgcatctgtaggagacagagtcaccatcacttgtcgggcgagtcagggtattagcagctggttagcctggtatcagcagaaaccagggaaagcccctaagctcctgatctatgctgcatccagtttgcaaagtggggtcccatcaaggttcagcggcagtggatctgggacagatttcactctcaccatcagcagcctgcagcctgaagattttgcaacttattactgtcagcaaacaaatagtttcccttacacttttggcggagggaccaaggttgagatcaaaggtggaggcggttcgggtggagggggatctggtggcggaggtagcggtggcgggggatcaggtggcgggggatcaggtggcgggggatcaggtggcgggggatcaggtggcgggggatcaggtggcgggggatcaggtggcgggggatcaggtggcgggggatcaggtggcgggggatcacccgctgctctgctgcctgcccggggtaccaacatggcccagaagcgtcctgcctgcaccctgaagcctgagtgtgtccagcagctgctggtttgctcccaggaggccaagaagtcagcctactgcccctacagtcactttcctgtgggggctgccctgctcacccaggaggggagaatcttcaaagggtgcaacatagaaaatgcctgctacccgctgggcatctgtgctgaacggaccgctatccagaaggccgtctcagaagggtacaaggatttcagggcaattgctatcgccagtgacatgcaagatgattttatctctccatgtggggcctgcaggcaagtcatgagagagtttggcaccaactggcccgtgtacatgaccaagccggatggtacgtatattcaccatcatcatcaccat

SEQ ID NO: 564 - DNA, 1170 bp, synthetic construct
  source 1..1170: mol_type = other DNA
gaggtgcagctggtggagtctgggggaggcttggtccagcctggagggtccctgagactctcctgtgcagcctctggattcaccttcagtgaccactacatggactgggtccgccaggctccagggaaggggctggagtgggttggccgtactagaaacaaagctagtagttacaccacagaatacgccgcgtctgtgaaaggcagattcaccatctcaagagatgattcaaagaactcactgtatctgcaaatgaacagcctgaaaaccgaggacacggcggtgtactactgcgccagagagcctaaatactggatcgacttcgacctatgggggagaggtaccttggtcaccgtctcctcaggagggggcggatcaggcggaggtggatcgggagggggtggtagcgacatccagatgacccagtctccatcctccctgtctgcatctgtaggagacagagtcaccatcacttgccgggcaagtcagagcattagcagctatttaaattggtatcagcagaaaccagggaaagcccctaagctcctgatctatgctgcatccagtttgcaaagtggggtcccatcaaggttcagtggcagtggatctgggacagatttcactctcaccatcagcagtctgcaacctgaagattttgcaacttactactgtcagcaaagctacatcgccccttacacttttggcggagggaccaaggttgagatcaaaggtggcgggggatcacccgctgctctgctgcctgcccggggtaccaacatggcccagaagcgtcctgcctgcaccctgaagcctgagtgtgtccagcagctgctggtttgctcccaggaggccaagaagtcagcctactgcccctacagtcactttcctgtgggggctgccctgctcacccaggaggggagaatcttcaaagggtgcaacatagaaaatgcctgctacccgctgggcatctgtgctgaacggaccgctatccagaaggccgtctcagaagggtacaaggatttcagggcaattgctatcgccagtgacatgcaagatgattttatctctccatgtggggcctgcaggcaagtcatgagagagtttggcaccaactggcccgtgtacatgaccaagccggatggtacgtatattcaccatcatcatcaccat

SEQ ID NO: 565 - DNA, 1200 bp, synthetic construct
  source 1..1200: mol_type = other DNA
gaggtgcagctggtggagtctgggggaggcttggtccagcctggagggtccctgagactctcctgtgcagcctctggattcaccttcagtgaccactacatggactgggtccgccaggctccagggaaggggctggagtgggttggccgtactagaaacaaagctagtagttacaccacagaatacgccgcgtctgtgaaaggcagattcaccatctcaagagatgattcaaagaactcactgtatctgcaaatgaacagcctgaaaaccgaggacacggcggtgtactactgcgccagagagcctaaatactggatcgacttcgacctatgggggagaggtaccttggtcaccgtctcctcaggagggggcggatcaggcggaggtggatcgggagggggtggtagcgacatccagatgacccagtctccatcctccctgtctgcatctgtaggagacagagtcaccatcacttgccgggcaagtcagagcattagcagctatttaaattggtatcagcagaaaccagggaaagcccctaagctcctgatctatgctgcatccagtttgcaaagtggggtcccatcaaggttcagtggcagtggatctgggacagatttcactctcaccatcagcagtctgcaacctgaagattttgcaacttactactgtcagcaaagctacatcgccccttacacttttggcggagggaccaaggttgagatcaaaggagggggcggatcaggcggaggtggatcgggagggggtggtagccccgctgctctgctgcctgcccggggtaccaacatggcccagaagcgtcctgcctgcaccctgaagcctgagtgtgtccagcagctgctggtttgctcccaggaggccaagaagtcagcctactgcccctacagtcactttcctgtgggggctgccctgctcacccaggaggggagaatcttcaaagggtgcaacatagaaaatgcctgctacccgctgggcatctgtgctgaacggaccgctatccagaaggccgtctcagaagggtacaaggatttcagggcaattgctatcgccagtgacatgcaagatgattttatctctccatgtggggcctgcaggcaagtcatgagagagtttggcaccaactggcccgtgtacatgaccaagccggatggtacgtatattcaccatcatcatcaccat

SEQ ID NO: 566 - DNA, 1215 bp, synthetic construct
  source 1..1215: mol_type = other DNA
gaggtgcagctggtggagtctgggggaggcttggtccagcctggagggtccctgagactctcctgtgcagcctctggattcaccttcagtgaccactacatggactgggtccgccaggctccagggaaggggctggagtgggttggccgtactagaaacaaagctagtagttacaccacagaatacgccgcgtctgtgaaaggcagattcaccatctcaagagatgattcaaagaactcactgtatctgcaaatgaacagcctgaaaaccgaggacacggcggtgtactactgcgccagagagcctaaatactggatcgacttcgacctatgggggagaggtaccttggtcaccgtctcctcaggagggggcggatcaggcggaggtggatcgggagggggtggtagcgacatccagatgacccagtctccatcctccctgtctgcatctgtaggagacagagtcaccatcacttgccgggcaagtcagagcattagcagctatttaaattggtatcagcagaaaccagggaaagcccctaagctcctgatctatgctgcatccagtttgcaaagtggggtcccatcaaggttcagtggcagtggatctgggacagatttcactctcaccatcagcagtctgcaacctgaagattttgcaacttactactgtcagcaaagctacatcgccccttacacttttggcggagggaccaaggttgagatcaaaggtggaggcggttcgggtggagggggatctggtggcggaggtagcggtggcgggggatcacccgctgctctgctgcctgcccggggtaccaacatggcccagaagcgtcctgcctgcaccctgaagcctgagtgtgtccagcagctgctggtttgctcccaggaggccaagaagtcagcctactgcccctacagtcactttcctgtgggggctgccctgctcacccaggaggggagaatcttcaaagggtgcaacatagaaaatgcctgctacccgctgggcatctgtgctgaacggaccgctatccagaaggccgtctcagaagggtacaaggatttcagggcaattgctatcgccagtgacatgcaagatgattttatctctccatgtggggcctgcaggcaagtcatgagagagtttggcaccaactggcccgtgtacatgaccaagccggatggtacgtatattcaccatcatcatcaccat

SEQ ID NO: 567 - DNA, 1230 bp, synthetic construct
  source 1..1230: mol_type = other DNA
gaggtgcagctggtggagtctgggggaggcttggtccagcctggagggtccctgagactctcctgtgcagcctctggattcaccttcagtgaccactacatggactgggtccgccaggctccagggaaggggctggagtgggttggccgtactagaaacaaagctagtagttacaccacagaatacgccgcgtctgtgaaaggcagattcaccatctcaagagatgattcaaagaactcactgtatctgcaaatgaacagcctgaaaaccgaggacacggcggtgtactactgcgccagagagcctaaatactggatcgacttcgacctatgggggagaggtaccttggtcaccgtctcctcaggagggggcggatcaggcggaggtggatcgggagggggtggtagcgacatccagatgacccagtctccatcctccctgtctgcatctgtaggagacagagtcaccatcacttgccgggcaagtcagagcattagcagctatttaaattggtatcagcagaaaccagggaaagcccctaagctcctgatctatgctgcatccagtttgcaaagtggggtcccatcaaggttcagtggcagtggatctgggacagatttcactctcaccatcagcagtctgcaacctgaagattttgcaacttactactgtcagcaaagctacatcgccccttacacttttggcggagggaccaaggttgagatcaaaggtggaggcggttcgggtggagggggatctggtggcggaggtagcggtggcgggggatcaggtggcgggggatcacccgctgctctgctgcctgcccggggtaccaacatggcccagaagcgtcctgcctgcaccctgaagcctgagtgtgtccagcagctgctggtttgctcccaggaggccaagaagtcagcctactgcccctacagtcactttcctgtgggggctgccctgctcacccaggaggggagaatcttcaaagggtgcaacatagaaaatgcctgctacccgctgggcatctgtgctgaacggaccgctatccagaaggccgtctcagaagggtacaaggatttcagggcaattgctatcgccagtgacatgcaagatgattttatctctccatgtggggcctgcaggcaagtcatgagagagtttggcaccaactggcccgtgtacatgaccaagccggatggtacgtatattcaccatcatcatcaccat

SEQ ID NO: 568 - DNA, 1245 bp, synthetic construct
  source 1..1245: mol_type = other DNA
gaggtgcagctggtggagtctgggggaggcttggtccagcctggagggtccctgagactctcctgtgcagcctctggattcaccttcagtgaccactacatggactgggtccgccaggctccagggaaggggctggagtgggttggccgtactagaaacaaagctagtagttacaccacagaatacgccgcgtctgtgaaaggcagattcaccatctcaagagatgattcaaagaactcactgtatctgcaaatgaacagcctgaaaaccgaggacacggcggtgtactactgcgccagagagcctaaatactggatcgacttcgacctatgggggagaggtaccttggtcaccgtctcctcaggagggggcggatcaggcggaggtggatcgggagggggtggtagcgacatccagatgacccagtctccatcctccctgtctgcatctgtaggagacagagtcaccatcacttgccgggcaagtcagagcattagcagctatttaaattggtatcagcagaaaccagggaaagcccctaagctcctgatctatgctgcatccagtttgcaaagtggggtcccatcaaggttcagtggcagtggatctgggacagatttcactctcaccatcagcagtctgcaacctgaagattttgcaacttactactgtcagcaaagctacatcgccccttacacttttggcggagggaccaaggttgagatcaaaggtggaggcggttcgggtggagggggatctggtggcggaggtagcggtggcgggggatcaggtggcgggggatcaggtggcgggggatcacccgctgctctgctgcctgcccggggtaccaacatggcccagaagcgtcctgcctgcaccctgaagcctgagtgtgtccagcagctgctggtttgctcccaggaggccaagaagtcagcctactgcccctacagtcactttcctgtgggggctgccctgctcacccaggaggggagaatcttcaaagggtgcaacatagaaaatgcctgctacccgctgggcatctgtgctgaacggaccgctatccagaaggccgtctcagaagggtacaaggatttcagggcaattgctatcgccagtgacatgcaagatgattttatctctccatgtggggcctgcaggcaagtcatgagagagtttggcaccaactggcccgtgtacatgaccaagccggatggtacgtatattcaccatcatcatcaccat

SEQ ID NO: 569 - DNA, 1260 bp, synthetic construct
  source 1..1260: mol_type = other DNA
gaggtgcagctggtggagtctgggggaggcttggtccagcctggagggtccctgagactctcctgtgcagcctctggattcaccttcagtgaccactacatggactgggtccgccaggctccagggaaggggctggagtgggttggccgtactagaaacaaagctagtagttacaccacagaatacgccgcgtctgtgaaaggcagattcaccatctcaagagatgattcaaagaactcactgtatctgcaaatgaacagcctgaaaaccgaggacacggcggtgtactactgcgccagagagcctaaatactggatcgacttcgacctatgggggagaggtaccttggtcaccgtctcctcaggagggggcggatcaggcggaggtggatcgggagggggtggtagcgacatccagatgacccagtctccatcctccctgtctgcatctgtaggagacagagtcaccatcacttgccgggcaagtcagagcattagcagctatttaaattggtatcagcagaaaccagggaaagcccctaagctcctgatctatgctgcatccagtttgcaaagtggggtcccatcaaggttcagtggcagtggatctgggacagatttcactctcaccatcagcagtctgcaacctgaagattttgcaacttactactgtcagcaaagctacatcgccccttacacttttggcggagggaccaaggttgagatcaaaggtggaggcggttcgggtggagggggatctggtggcggaggtagcggtggcgggggatcaggtggcgggggatcaggtggcgggggatcaggtggcgggggatcacccgctgctctgctgcctgcccggggtaccaacatggcccagaagcgtcctgcctgcaccctgaagcctgagtgtgtccagcagctgctggtttgctcccaggaggccaagaagtcagcctactgcccctacagtcactttcctgtgggggctgccctgctcacccaggaggggagaatcttcaaagggtgcaacatagaaaatgcctgctacccgctgggcatctgtgctgaacggaccgctatccagaaggccgtctcagaagggtacaaggatttcagggcaattgctatcgccagtgacatgcaagatgattttatctctccatgtggggcctgcaggcaagtcatgagagagtttggcaccaactggcccgtgtacatgaccaagccggatggtacgtatattcaccatcatcatcaccat

SEQ ID NO: 570 - DNA, 1275 bp, synthetic construct
  source 1..1275: mol_type = other DNA
gaggtgcagctggtggagtctgggggaggcttggtccagcctggagggtccctgagactctcctgtgcagcctctggattcaccttcagtgaccactacatggactgggtccgccaggctccagggaaggggctggagtgggttggccgtactagaaacaaagctagtagttacaccacagaatacgccgcgtctgtgaaaggcagattcaccatctcaagagatgattcaaagaactcactgtatctgcaaatgaacagcctgaaaaccgaggacacggcggtgtactactgcgccagagagcctaaatactggatcgacttcgacctatgggggagaggtaccttggtcaccgtctcctcaggagggggcggatcaggcggaggtggatcgggagggggtggtagcgacatccagatgacccagtctccatcctccctgtctgcatctgtaggagacagagtcaccatcacttgccgggcaagtcagagcattagcagctatttaaattggtatcagcagaaaccagggaaagcccctaagctcctgatctatgctgcatccagtttgcaaagtggggtcccatcaaggttcagtggcagtggatctgggacagatttcactctcaccatcagcagtctgcaacctgaagattttgcaacttactactgtcagcaaagctacatcgccccttacacttttggcggagggaccaaggttgagatcaaaggtggaggcggttcgggtggagggggatctggtggcggaggtagcggtggcgggggatcaggtggcgggggatcaggtggcgggggatcaggtggcgggggatcaggtggcgggggatcacccgctgctctgctgcctgcccggggtaccaacatggcccagaagcgtcctgcctgcaccctgaagcctgagtgtgtccagcagctgctggtttgctcccaggaggccaagaagtcagcctactgcccctacagtcactttcctgtgggggctgccctgctcacccaggaggggagaatcttcaaagggtgcaacatagaaaatgcctgctacccgctgggcatctgtgctgaacggaccgctatccagaaggccgtctcagaagggtacaaggatttcagggcaattgctatcgccagtgacatgcaagatgattttatctctccatgtggggcctgcaggcaagtcatgagagagtttggcaccaactggcccgtgtacatgaccaagccggatggtacgtatattcaccatcatcatcaccat

SEQ ID NO: 571 - DNA, 1290 bp, synthetic construct
  source 1..1290: mol_type = other DNA
gaggtgcagctggtggagtctgggggaggcttggtccagcctggagggtccctgagactctcctgtgcagcctctggattcaccttcagtgaccactacatggactgggtccgccaggctccagggaaggggctggagtgggttggccgtactagaaacaaagctagtagttacaccacagaatacgccgcgtctgtgaaaggcagattcaccatctcaagagatgattcaaagaactcactgtatctgcaaatgaacagcctgaaaaccgaggacacggcggtgtactactgcgccagagagcctaaatactggatcgacttcgacctatgggggagaggtaccttggtcaccgtctcctcaggagggggcggatcaggcggaggtggatcgggagggggtggtagcgacatccagatgacccagtctccatcctccctgtctgcatctgtaggagacagagtcaccatcacttgccgggcaagtcagagcattagcagctatttaaattggtatcagcagaaaccagggaaagcccctaagctcctgatctatgctgcatccagtttgcaaagtggggtcccatcaaggttcagtggcagtggatctgggacagatttcactctcaccatcagcagtctgcaacctgaagattttgcaacttactactgtcagcaaagctacatcgccccttacacttttggcggagggaccaaggttgagatcaaaggtggaggcggttcgggtggagggggatctggtggcggaggtagcggtggcgggggatcaggtggcgggggatcaggtggcgggggatcaggtggcgggggatcaggtggcgggggatcaggtggcgggggatcacccgctgctctgctgcctgcccggggtaccaacatggcccagaagcgtcctgcctgcaccctgaagcctgagtgtgtccagcagctgctggtttgctcccaggaggccaagaagtcagcctactgcccctacagtcactttcctgtgggggctgccctgctcacccaggaggggagaatcttcaaagggtgcaacatagaaaatgcctgctacccgctgggcatctgtgctgaacggaccgctatccagaaggccgtctcagaagggtacaaggatttcagggcaattgctatcgccagtgacatgcaagatgattttatctctccatgtggggcctgcaggcaagtcatgagagagtttggcaccaactggcccgtgtacatgaccaagccggatggtacgtatattcaccatcatcatcaccat

SEQ ID NO: 572 - DNA, 1305 bp, synthetic construct
  source 1..1305: mol_type = other DNA
gaggtgcagctggtggagtctgggggaggcttggtccagcctggagggtccctgagactctcctgtgcagcctctggattcaccttcagtgaccactacatggactgggtccgccaggctccagggaaggggctggagtgggttggccgtactagaaacaaagctagtagttacaccacagaatacgccgcgtctgtgaaaggcagattcaccatctcaagagatgattcaaagaactcactgtatctgcaaatgaacagcctgaaaaccgaggacacggcggtgtactactgcgccagagagcctaaatactggatcgacttcgacctatgggggagaggtaccttggtcaccgtctcctcaggagggggcggatcaggcggaggtggatcgggagggggtggtagcgacatccagatgacccagtctccatcctccctgtctgcatctgtaggagacagagtcaccatcacttgccgggcaagtcagagcattagcagctatttaaattggtatcagcagaaaccagggaaagcccctaagctcctgatctatgctgcatccagtttgcaaagtggggtcccatcaaggttcagtggcagtggatctgggacagatttcactctcaccatcagcagtctgcaacctgaagattttgcaacttactactgtcagcaaagctacatcgccccttacacttttggcggagggaccaaggttgagatcaaaggtggaggcggttcgggtggagggggatctggtggcggaggtagcggtggcgggggatcaggtggcgggggatcaggtggcgggggatcaggtggcgggggatcaggtggcgggggatcaggtggcgggggatcaggtggcgggggatcacccgctgctctgctgcctgcccggggtaccaacatggcccagaagcgtcctgcctgcaccctgaagcctgagtgtgtccagcagctgctggtttgctcccaggaggccaagaagtcagcctactgcccctacagtcactttcctgtgggggctgccctgctcacccaggaggggagaatcttcaaagggtgcaacatagaaaatgcctgctacccgctgggcatctgtgctgaacggaccgctatccagaaggccgtctcagaagggtacaaggatttcagggcaattgctatcgccagtgacatgcaagatgattttatctctccatgtggggcctgcaggcaagtcatgagagagtttggcaccaactggcccgtgtacatgaccaagccggatggtacgtatattcaccatcatcatcaccat

SEQ ID NO: 573 - DNA, 1320 bp, synthetic construct
  source 1..1320: mol_type = other DNA
gaggtgcagctggtggagtctgggggaggcttggtccagcctggagggtccctgagactctcctgtgcagcctctggattcaccttcagtgaccactacatggactgggtccgccaggctccagggaaggggctggagtgggttggccgtactagaaacaaagctagtagttacaccacagaatacgccgcgtctgtgaaaggcagattcaccatctcaagagatgattcaaagaactcactgtatctgcaaatgaacagcctgaaaaccgaggacacggcggtgtactactgcgccagagagcctaaatactggatcgacttcgacctatgggggagaggtaccttggtcaccgtctcctcaggagggggcggatcaggcggaggtggatcgggagggggtggtagcgacatccagatgacccagtctccatcctccctgtctgcatctgtaggagacagagtcaccatcacttgccgggcaagtcagagcattagcagctatttaaattggtatcagcagaaaccagggaaagcccctaagctcctgatctatgctgcatccagtttgcaaagtggggtcccatcaaggttcagtggcagtggatctgggacagatttcactctcaccatcagcagtctgcaacctgaagattttgcaacttactactgtcagcaaagctacatcgccccttacacttttggcggagggaccaaggttgagatcaaaggtggaggcggttcgggtggagggggatctggtggcggaggtagcggtggcgggggatcaggtggcgggggatcaggtggcgggggatcaggtggcgggggatcaggtggcgggggatcaggtggcgggggatcaggtggcgggggatcaggtggcgggggatcacccgctgctctgctgcctgcccggggtaccaacatggcccagaagcgtcctgcctgcaccctgaagcctgagtgtgtccagcagctgctggtttgctcccaggaggccaagaagtcagcctactgcccctacagtcactttcctgtgggggctgccctgctcacccaggaggggagaatcttcaaagggtgcaacatagaaaatgcctgctacccgctgggcatctgtgctgaacggaccgctatccagaaggccgtctcagaagggtacaaggatttcagggcaattgctatcgccagtgacatgcaagatgattttatctctccatgtggggcctgcaggcaagtcatgagagagtttggcaccaactggcccgtgtacatgaccaagccggatggtacgtatattcaccatcatcatcaccat

SEQ ID NO: 574 - DNA, 1335 bp, synthetic construct
  source 1..1335: mol_type = other DNA
gaggtgcagctggtggagtctgggggaggcttggtccagcctggagggtccctgagactctcctgtgcagcctctggattcaccttcagtgaccactacatggactgggtccgccaggctccagggaaggggctggagtgggttggccgtactagaaacaaagctagtagttacaccacagaatacgccgcgtctgtgaaaggcagattcaccatctcaagagatgattcaaagaactcactgtatctgcaaatgaacagcctgaaaaccgaggacacggcggtgtactactgcgccagagagcctaaatactggatcgacttcgacctatgggggagaggtaccttggtcaccgtctcctcaggagggggcggatcaggcggaggtggatcgggagggggtggtagcgacatccagatgacccagtctccatcctccctgtctgcatctgtaggagacagagtcaccatcacttgccgggcaagtcagagcattagcagctatttaaattggtatcagcagaaaccagggaaagcccctaagctcctgatctatgctgcatccagtttgcaaagtggggtcccatcaaggttcagtggcagtggatctgggacagatttcactctcaccatcagcagtctgcaacctgaagattttgcaacttactactgtcagcaaagctacatcgccccttacacttttggcggagggaccaaggttgagatcaaaggtggaggcggttcgggtggagggggatctggtggcggaggtagcggtggcgggggatcaggtggcgggggatcaggtggcgggggatcaggtggcgggggatcaggtggcgggggatcaggtggcgggggatcaggtggcgggggatcaggtggcgggggatcaggtggcgggggatcacccgctgctctgctgcctgcccggggtaccaacatggcccagaagcgtcctgcctgcaccctgaagcctgagtgtgtccagcagctgctggtttgctcccaggaggccaagaagtcagcctactgcccctacagtcactttcctgtgggggctgccctgctcacccaggaggggagaatcttcaaagggtgcaacatagaaaatgcctgctacccgctgggcatctgtgctgaacggaccgctatccagaaggccgtctcagaagggtacaaggatttcagggcaattgctatcgccagtgacatgcaagatgattttatctctccatgtggggcctgcaggcaagtcatgagagagtttggcaccaactggcccgtgtacatgaccaagccggatggtacgtatattcaccatcatcatcaccat

SEQ ID NO: 575 - DNA, 1143 bp, synthetic construct
  source 1..1143: mol_type = other DNA
gaggtgcagctggtggagtctgggggaggcttggtacagccagggcggtccctgagactctcctgtacagcttctggattcaccttcagtgaccacgacatgaactgggtccgccaggctccagggaaggggctggagtgggttggccgtactagaaacgccgctggaagttacaccacagaatacgccgcgtctgtgaaaggcagattcaccatctcaagagatgattcaaagaactcactgtatctgcaaatgaacagcctgaaaaccgaggacacggcggtgtactactgcgccagagagcctaaatactggatcgacttcgacctatgggggggagggggcggatcaggcggaggtggatcgggagggggtggtagcgacatccagatgacccagtctccatcctccctgtctgcatctgtaggagacagagtcaccatcacttgccgggcaagtcagagcattagcagctatttaaattggtatcagcagaaaccagggaaagcccctaagctcctgatctatgctgcatccagtttgcaaagtggggtcccatcaaggttcagtggcagtggatctgggacagatttcactctcaccatcagcagtctgcaacctgaagattttgcaacttactactgtcagcaaagctacatcgccccttacacttttggcggagggaccaaggttgagatcaaaggtggcgggggatcacccgctgctctgctgcctgcccggggtaccaacatggcccagaagcgtcctgcctgcaccctgaagcctgagtgtgtccagcagctgctggtttgctcccaggaggccaagaagtcagcctactgcccctacagtcactttcctgtgggggctgccctgctcacccaggaggggagaatcttcaaagggtgcaacatagaaaatgcctgctacccgctgggcatctgtgctgaacggaccgctatccagaaggccgtctcagaagggtacaaggatttcagggcaattgctatcgccagtgacatgcaagatgattttatctctccatgtggggcctgcaggcaagtcatgagagagtttggcaccaactggcccgtgtacatgaccaagccggatggtacgtatattcaccatcatcatcaccat

SEQ ID NO: 576 - DNA, 1173 bp, synthetic construct
  source 1..1173: mol_type = other DNA
gaggtgcagctggtggagtctgggggaggcttggtacagccagggcggtccctgagactctcctgtacagcttctggattcaccttcagtgaccacgacatgaactgggtccgccaggctccagggaaggggctggagtgggttggccgtactagaaacgccgctggaagttacaccacagaatacgccgcgtctgtgaaaggcagattcaccatctcaagagatgattcaaagaactcactgtatctgcaaatgaacagcctgaaaaccgaggacacggcggtgtactactgcgccagagagcctaaatactggatcgacttcgacctatgggggggagggggcggatcaggcggaggtggatcgggagggggtggtagcgacatccagatgacccagtctccatcctccctgtctgcatctgtaggagacagagtcaccatcacttgccgggcaagtcagagcattagcagctatttaaattggtatcagcagaaaccagggaaagcccctaagctcctgatctatgctgcatccagtttgcaaagtggggtcccatcaaggttcagtggcagtggatctgggacagatttcactctcaccatcagcagtctgcaacctgaagattttgcaacttactactgtcagcaaagctacatcgccccttacacttttggcggagggaccaaggttgagatcaaaggagggggcggatcaggcggaggtggatcgggagggggtggtagccccgctgctctgctgcctgcccggggtaccaacatggcccagaagcgtcctgcctgcaccctgaagcctgagtgtgtccagcagctgctggtttgctcccaggaggccaagaagtcagcctactgcccctacagtcactttcctgtgggggctgccctgctcacccaggaggggagaatcttcaaagggtgcaacatagaaaatgcctgctacccgctgggcatctgtgctgaacggaccgctatccagaaggccgtctcagaagggtacaaggatttcagggcaattgctatcgccagtgacatgcaagatgattttatctctccatgtggggcctgcaggcaagtcatgagagagtttggcaccaactggcccgtgtacatgaccaagccggatggtacgtatattcaccatcatcatcaccat

SEQ ID NO: 577 - DNA, 1188 bp, synthetic construct
  source 1..1188: mol_type = other DNA
gaggtgcagctggtggagtctgggggaggcttggtacagccagggcggtccctgagactctcctgtacagcttctggattcaccttcagtgaccacgacatgaactgggtccgccaggctccagggaaggggctggagtgggttggccgtactagaaacgccgctggaagttacaccacagaatacgccgcgtctgtgaaaggcagattcaccatctcaagagatgattcaaagaactcactgtatctgcaaatgaacagcctgaaaaccgaggacacggcggtgtactactgcgccagagagcctaaatactggatcgacttcgacctatgggggggagggggcggatcaggcggaggtggatcgggagggggtggtagcgacatccagatgacccagtctccatcctccctgtctgcatctgtaggagacagagtcaccatcacttgccgggcaagtcagagcattagcagctatttaaattggtatcagcagaaaccagggaaagcccctaagctcctgatctatgctgcatccagtttgcaaagtggggtcccatcaaggttcagtggcagtggatctgggacagatttcactctcaccatcagcagtctgcaacctgaagattttgcaacttactactgtcagcaaagctacatcgccccttacacttttggcggagggaccaaggttgagatcaaaggtggaggcggttcgggtggagggggatctggtggcggaggtagcggtggcgggggatcacccgctgctctgctgcctgcccggggtaccaacatggcccagaagcgtcctgcctgcaccctgaagcctgagtgtgtccagcagctgctggtttgctcccaggaggccaagaagtcagcctactgcccctacagtcactttcctgtgggggctgccctgctcacccaggaggggagaatcttcaaagggtgcaacatagaaaatgcctgctacccgctgggcatctgtgctgaacggaccgctatccagaaggccgtctcagaagggtacaaggatttcagggcaattgctatcgccagtgacatgcaagatgattttatctctccatgtggggcctgcaggcaagtcatgagagagtttggcaccaactggcccgtgtacatgaccaagccggatggtacgtatattcaccatcatcatcaccat

SEQ ID NO: 578 - DNA, 1203 bp, synthetic construct
  source 1..1203: mol_type = other DNA
gaggtgcagctggtggagtctgggggaggcttggtacagccagggcggtccctgagactctcctgtacagcttctggattcaccttcagtgaccacgacatgaactgggtccgccaggctccagggaaggggctggagtgggttggccgtactagaaacgccgctggaagttacaccacagaatacgccgcgtctgtgaaaggcagattcaccatctcaagagatgattcaaagaactcactgtatctgcaaatgaacagcctgaaaaccgaggacacggcggtgtactactgcgccagagagcctaaatactggatcgacttcgacctatgggggggagggggcggatcaggcggaggtggatcgggagggggtggtagcgacatccagatgacccagtctccatcctccctgtctgcatctgtaggagacagagtcaccatcacttgccgggcaagtcagagcattagcagctatttaaattggtatcagcagaaaccagggaaagcccctaagctcctgatctatgctgcatccagtttgcaaagtggggtcccatcaaggttcagtggcagtggatctgggacagatttcactctcaccatcagcagtctgcaacctgaagattttgcaacttactactgtcagcaaagctacatcgccccttacacttttggcggagggaccaaggttgagatcaaaggtggaggcggttcgggtggagggggatctggtggcggaggtagcggtggcgggggatcaggtggcgggggatcacccgctgctctgctgcctgcccggggtaccaacatggcccagaagcgtcctgcctgcaccctgaagcctgagtgtgtccagcagctgctggtttgctcccaggaggccaagaagtcagcctactgcccctacagtcactttcctgtgggggctgccctgctcacccaggaggggagaatcttcaaagggtgcaacatagaaaatgcctgctacccgctgggcatctgtgctgaacggaccgctatccagaaggccgtctcagaagggtacaaggatttcagggcaattgctatcgccagtgacatgcaagatgattttatctctccatgtggggcctgcaggcaagtcatgagagagtttggcaccaactggcccgtgtacatgaccaagccggatggtacgtatattcaccatcatcatcaccat

SEQ ID NO: 579 - DNA, 1218 bp, synthetic construct
  source 1..1218: mol_type = other DNA
gaggtgcagctggtggagtctgggggaggcttggtacagccagggcggtccctgagactctcctgtacagcttctggattcaccttcagtgaccacgacatgaactgggtccgccaggctccagggaaggggctggagtgggttggccgtactagaaacgccgctggaagttacaccacagaatacgccgcgtctgtgaaaggcagattcaccatctcaagagatgattcaaagaactcactgtatctgcaaatgaacagcctgaaaaccgaggacacggcggtgtactactgcgccagagagcctaaatactggatcgacttcgacctatgggggggagggggcggatcaggcggaggtggatcgggagggggtggtagcgacatccagatgacccagtctccatcctccctgtctgcatctgtaggagacagagtcaccatcacttgccgggcaagtcagagcattagcagctatttaaattggtatcagcagaaaccagggaaagcccctaagctcctgatctatgctgcatccagtttgcaaagtggggtcccatcaaggttcagtggcagtggatctgggacagatttcactctcaccatcagcagtctgcaacctgaagattttgcaacttactactgtcagcaaagctacatcgccccttacacttttggcggagggaccaaggttgagatcaaaggtggaggcggttcgggtggagggggatctggtggcggaggtagcggtggcgggggatcaggtggcgggggatcaggtggcgggggatcacccgctgctctgctgcctgcccggggtaccaacatggcccagaagcgtcctgcctgcaccctgaagcctgagtgtgtccagcagctgctggtttgctcccaggaggccaagaagtcagcctactgcccctacagtcactttcctgtgggggctgccctgctcacccaggaggggagaatcttcaaagggtgcaacatagaaaatgcctgctacccgctgggcatctgtgctgaacggaccgctatccagaaggccgtctcagaagggtacaaggatttcagggcaattgctatcgccagtgacatgcaagatgattttatctctccatgtggggcctgcaggcaagtcatgagagagtttggcaccaactggcccgtgtacatgaccaagccggatggtacgtatattcaccatcatcatcaccat

SEQ ID NO: 580 - DNA, 1233 bp, synthetic construct
  source 1..1233: mol_type = other DNA
gaggtgcagctggtggagtctgggggaggcttggtacagccagggcggtccctgagactctcctgtacagcttctggattcaccttcagtgaccacgacatgaactgggtccgccaggctccagggaaggggctggagtgggttggccgtactagaaacgccgctggaagttacaccacagaatacgccgcgtctgtgaaaggcagattcaccatctcaagagatgattcaaagaactcactgtatctgcaaatgaacagcctgaaaaccgaggacacggcggtgtactactgcgccagagagcctaaatactggatcgacttcgacctatgggggggagggggcggatcaggcggaggtggatcgggagggggtggtagcgacatccagatgacccagtctccatcctccctgtctgcatctgtaggagacagagtcaccatcacttgccgggcaagtcagagcattagcagctatttaaattggtatcagcagaaaccagggaaagcccctaagctcctgatctatgctgcatccagtttgcaaagtggggtcccatcaaggttcagtggcagtggatctgggacagatttcactctcaccatcagcagtctgcaacctgaagattttgcaacttactactgtcagcaaagctacatcgccccttacacttttggcggagggaccaaggttgagatcaaaggtggaggcggttcgggtggagggggatctggtggcggaggtagcggtggcgggggatcaggtggcgggggatcaggtggcgggggatcaggtggcgggggatcacccgctgctctgctgcctgcccggggtaccaacatggcccagaagcgtcctgcctgcaccctgaagcctgagtgtgtccagcagctgctggtttgctcccaggaggccaagaagtcagcctactgcccctacagtcactttcctgtgggggctgccctgctcacccaggaggggagaatcttcaaagggtgcaacatagaaaatgcctgctacccgctgggcatctgtgctgaacggaccgctatccagaaggccgtctcagaagggtacaaggatttcagggcaattgctatcgccagtgacatgcaagatgattttatctctccatgtggggcctgcaggcaagtcatgagagagtttggcaccaactggcccgtgtacatgaccaagccggatggtacgtatattcaccatcatcatcaccat

SEQ ID NO: 581 - DNA, 1248 bp, synthetic construct
  source 1..1248: mol_type = other DNA
gaggtgcagctggtggagtctgggggaggcttggtacagccagggcggtccctgagactctcctgtacagcttctggattcaccttcagtgaccacgacatgaactgggtccgccaggctccagggaaggggctggagtgggttggccgtactagaaacgccgctggaagttacaccacagaatacgccgcgtctgtgaaaggcagattcaccatctcaagagatgattcaaagaactcactgtatctgcaaatgaacagcctgaaaaccgaggacacggcggtgtactactgcgccagagagcctaaatactggatcgacttcgacctatgggggggagggggcggatcaggcggaggtggatcgggagggggtggtagcgacatccagatgacccagtctccatcctccctgtctgcatctgtaggagacagagtcaccatcacttgccgggcaagtcagagcattagcagctatttaaattggtatcagcagaaaccagggaaagcccctaagctcctgatctatgctgcatccagtttgcaaagtggggtcccatcaaggttcagtggcagtggatctgggacagatttcactctcaccatcagcagtctgcaacctgaagattttgcaacttactactgtcagcaaagctacatcgccccttacacttttggcggagggaccaaggttgagatcaaaggtggaggcggttcgggtggagggggatctggtggcggaggtagcggtggcgggggatcaggtggcgggggatcaggtggcgggggatcaggtggcgggggatcaggtggcgggggatcacccgctgctctgctgcctgcccggggtaccaacatggcccagaagcgtcctgcctgcaccctgaagcctgagtgtgtccagcagctgctggtttgctcccaggaggccaagaagtcagcctactgcccctacagtcactttcctgtgggggctgccctgctcacccaggaggggagaatcttcaaagggtgcaacatagaaaatgcctgctacccgctgggcatctgtgctgaacggaccgctatccagaaggccgtctcagaagggtacaaggatttcagggcaattgctatcgccagtgacatgcaagatgattttatctctccatgtggggcctgcaggcaagtcatgagagagtttggcaccaactggcccgtgtacatgaccaagccggatggtacgtatattcaccatcatcatcaccat

SEQ ID NO: 582 - DNA, 1263 bp, synthetic construct
  source 1..1263: mol_type = other DNA
gaggtgcagctggtggagtctgggggaggcttggtacagccagggcggtccctgagactctcctgtacagcttctggattcaccttcagtgaccacgacatgaactgggtccgccaggctccagggaaggggctggagtgggttggccgtactagaaacgccgctggaagttacaccacagaatacgccgcgtctgtgaaaggcagattcaccatctcaagagatgattcaaagaactcactgtatctgcaaatgaacagcctgaaaaccgaggacacggcggtgtactactgcgccagagagcctaaatactggatcgacttcgacctatgggggggagggggcggatcaggcggaggtggatcgggagggggtggtagcgacatccagatgacccagtctccatcctccctgtctgcatctgtaggagacagagtcaccatcacttgccgggcaagtcagagcattagcagctatttaaattggtatcagcagaaaccagggaaagcccctaagctcctgatctatgctgcatccagtttgcaaagtggggtcccatcaaggttcagtggcagtggatctgggacagatttcactctcaccatcagcagtctgcaacctgaagattttgcaacttactactgtcagcaaagctacatcgccccttacacttttggcggagggaccaaggttgagatcaaaggtggaggcggttcgggtggagggggatctggtggcggaggtagcggtggcgggggatcaggtggcgggggatcaggtggcgggggatcaggtggcgggggatcaggtggcgggggatcaggtggcgggggatcacccgctgctctgctgcctgcccggggtaccaacatggcccagaagcgtcctgcctgcaccctgaagcctgagtgtgtccagcagctgctggtttgctcccaggaggccaagaagtcagcctactgcccctacagtcactttcctgtgggggctgccctgctcacccaggaggggagaatcttcaaagggtgcaacatagaaaatgcctgctacccgctgggcatctgtgctgaacggaccgctatccagaaggccgtctcagaagggtacaaggatttcagggcaattgctatcgccagtgacatgcaagatgattttatctctccatgtggggcctgcaggcaagtcatgagagagtttggcaccaactggcccgtgtacatgaccaagccggatggtacgtatattcaccatcatcatcaccat

SEQ ID NO: 583 - DNA, 1278 bp, synthetic construct
  source 1..1278: mol_type = other DNA
gaggtgcagctggtggagtctgggggaggcttggtacagccagggcggtccctgagactctcctgtacagcttctggattcaccttcagtgaccacgacatgaactgggtccgccaggctccagggaaggggctggagtgggttggccgtactagaaacgccgctggaagttacaccacagaatacgccgcgtctgtgaaaggcagattcaccatctcaagagatgattcaaagaactcactgtatctgcaaatgaacagcctgaaaaccgaggacacggcggtgtactactgcgccagagagcctaaatactggatcgacttcgacctatgggggggagggggcggatcaggcggaggtggatcgggagggggtggtagcgacatccagatgacccagtctccatcctccctgtctgcatctgtaggagacagagtcaccatcacttgccgggcaagtcagagcattagcagctatttaaattggtatcagcagaaaccagggaaagcccctaagctcctgatctatgctgcatccagtttgcaaagtggggtcccatcaaggttcagtggcagtggatctgggacagatttcactctcaccatcagcagtctgcaacctgaagattttgcaacttactactgtcagcaaagctacatcgccccttacacttttggcggagggaccaaggttgagatcaaaggtggaggcggttcgggtggagggggatctggtggcggaggtagcggtggcgggggatcaggtggcgggggatcaggtggcgggggatcaggtggcgggggatcaggtggcgggggatcaggtggcgggggatcaggtggcgggggatcacccgctgctctgctgcctgcccggggtaccaacatggcccagaagcgtcctgcctgcaccctgaagcctgagtgtgtccagcagctgctggtttgctcccaggaggccaagaagtcagcctactgcccctacagtcactttcctgtgggggctgccctgctcacccaggaggggagaatcttcaaagggtgcaacatagaaaatgcctgctacccgctgggcatctgtgctgaacggaccgctatccagaaggccgtctcagaagggtacaaggatttcagggcaattgctatcgccagtgacatgcaagatgattttatctctccatgtggggcctgcaggcaagtcatgagagagtttggcaccaactggcccgtgtacatgaccaagccggatggtacgtatattcaccatcatcatcaccat

SEQ ID NO: 584 - DNA, 1293 bp, synthetic construct
  source 1..1293: mol_type = other DNA
gaggtgcagctggtggagtctgggggaggcttggtacagccagggcggtccctgagactctcctgtacagcttctggattcaccttcagtgaccacgacatgaactgggtccgccaggctccagggaaggggctggagtgggttggccgtactagaaacgccgctggaagttacaccacagaatacgccgcgtctgtgaaaggcagattcaccatctcaagagatgattcaaagaactcactgtatctgcaaatgaacagcctgaaaaccgaggacacggcggtgtactactgcgccagagagcctaaatactggatcgacttcgacctatgggggggagggggcggatcaggcggaggtggatcgggagggggtggtagcgacatccagatgacccagtctccatcctccctgtctgcatctgtaggagacagagtcaccatcacttgccgggcaagtcagagcattagcagctatttaaattggtatcagcagaaaccagggaaagcccctaagctcctgatctatgctgcatccagtttgcaaagtggggtcccatcaaggttcagtggcagtggatctgggacagatttcactctcaccatcagcagtctgcaacctgaagattttgcaacttactactgtcagcaaagctacatcgccccttacacttttggcggagggaccaaggttgagatcaaaggtggaggcggttcgggtggagggggatctggtggcggaggtagcggtggcgggggatcaggtggcgggggatcaggtggcgggggatcaggtggcgggggatcaggtggcgggggatcaggtggcgggggatcaggtggcgggggatcaggtggcgggggatcacccgctgctctgctgcctgcccggggtaccaacatggcccagaagcgtcctgcctgcaccctgaagcctgagtgtgtccagcagctgctggtttgctcccaggaggccaagaagtcagcctactgcccctacagtcactttcctgtgggggctgccctgctcacccaggaggggagaatcttcaaagggtgcaacatagaaaatgcctgctacccgctgggcatctgtgctgaacggaccgctatccagaaggccgtctcagaagggtacaaggatttcagggcaattgctatcgccagtgacatgcaagatgattttatctctccatgtggggcctgcaggcaagtcatgagagagtttggcaccaactggcccgtgtacatgaccaagccggatggtacgtatattcaccatcatcatcaccat

SEQ ID NO: 585 - DNA, 1308 bp, synthetic construct
  source 1..1308: mol_type = other DNA
gaggtgcagctggtggagtctgggggaggcttggtacagccagggcggtccctgagactctcctgtacagcttctggattcaccttcagtgaccacgacatgaactgggtccgccaggctccagggaaggggctggagtgggttggccgtactagaaacgccgctggaagttacaccacagaatacgccgcgtctgtgaaaggcagattcaccatctcaagagatgattcaaagaactcactgtatctgcaaatgaacagcctgaaaaccgaggacacggcggtgtactactgcgccagagagcctaaatactggatcgacttcgacctatgggggggagggggcggatcaggcggaggtggatcgggagggggtggtagcgacatccagatgacccagtctccatcctccctgtctgcatctgtaggagacagagtcaccatcacttgccgggcaagtcagagcattagcagctatttaaattggtatcagcagaaaccagggaaagcccctaagctcctgatctatgctgcatccagtttgcaaagtggggtcccatcaaggttcagtggcagtggatctgggacagatttcactctcaccatcagcagtctgcaacctgaagattttgcaacttactactgtcagcaaagctacatcgccccttacacttttggcggagggaccaaggttgagatcaaaggtggaggcggttcgggtggagggggatctggtggcggaggtagcggtggcgggggatcaggtggcgggggatcaggtggcgggggatcaggtggcgggggatcaggtggcgggggatcaggtggcgggggatcaggtggcgggggatcaggtggcgggggatcaggtggcgggggatcacccgctgctctgctgcctgcccggggtaccaacatggcccagaagcgtcctgcctgcaccctgaagcctgagtgtgtccagcagctgctggtttgctcccaggaggccaagaagtcagcctactgcccctacagtcactttcctgtgggggctgccctgctcacccaggaggggagaatcttcaaagggtgcaacatagaaaatgcctgctacccgctgggcatctgtgctgaacggaccgctatccagaaggccgtctcagaagggtacaaggatttcagggcaattgctatcgccagtgacatgcaagatgattttatctctccatgtggggcctgcaggcaagtcatgagagagtttggcaccaactggcccgtgtacatgaccaagccggatggtacgtatattcaccatcatcatcaccat

SEQ ID NO: 586 - DNA, 1170 bp, synthetic construct
  source 1..1170: mol_type = other DNA
gacatccagatgacccagtctccatcctccctgtctgcatctgtaggagacagagtcaccatcacttgccgggcaagtcagagcattagcagctatttaaattggtatcagcagaaaccagggaaagcccctaagctcctgatctatgctgcatccagtttgcaaagtggggtcccatcaaggttcagtggcagtggatgcggtacagatttcactctcaccatcagcagtctgcaacctgaagattttgcaacttactactgtcagcaaagctacatcgccccttacacttttggcggagggaccaaggttgagatcaaaggagggggcggatcaggcggaggtggatcgggagggggtggtagcgaggtgcagctggtggagtctgggggaggcttggtccagcctggagggtccctgagactctcctgtgcagcctctggattcaccttcgtagaccacgacatggactgggtccgccaggctccagggaaggggctggagtgggttggccgtactagaaacaaactaggaagttacaccacagaatacgccgcgtctgtgaaaggcagattcaccatctcaagagatgattcaaagaactcactgtatctgcaaatgaacagcctgaaaaccgaggacacggcggtgtactactgcgccagagagcctaaatactggatcgacttcgacctatgggggagaggtaccttggtcaccgtctcctcaggtggcgggggatcacccgctgctctgctgcctgcccggggtaccaacatggcccagaagcgtcctgcctgcaccctgaagcctgagtgtgtccagcagctgctggtttgctcccaggaggccaagaagtcagcctactgcccctacagtcactttcctgtgggggctgccctgctcacccaggaggggagaatcttcaaagggtgcaacatagaaaatgcctgctacccgctgggcatctgtgctgaacggaccgctatccagaaggccgtctcagaagggtacaaggatttcagggcaattgctatcgccagtgacatgcaagatgattttatctctccatgtggggcctgcaggcaagtcatgagagagtttggcaccaactggcccgtgtacatgaccaagccggatggtacgtatattcaccatcatcatcaccat

SEQ ID NO: 587 - DNA, 1200 bp, synthetic construct
  source 1..1200: mol_type = other DNA
gacatccagatgacccagtctccatcctccctgtctgcatctgtaggagacagagtcaccatcacttgccgggcaagtcagagcattagcagctatttaaattggtatcagcagaaaccagggaaagcccctaagctcctgatctatgctgcatccagtttgcaaagtggggtcccatcaaggttcagtggcagtggatgcggtacagatttcactctcaccatcagcagtctgcaacctgaagattttgcaacttactactgtcagcaaagctacatcgccccttacacttttggcggagggaccaaggttgagatcaaaggagggggcggatcaggcggaggtggatcgggagggggtggtagcgaggtgcagctggtggagtctgggggaggcttggtccagcctggagggtccctgagactctcctgtgcagcctctggattcaccttcgtagaccacgacatggactgggtccgccaggctccagggaaggggctggagtgggttggccgtactagaaacaaactaggaagttacaccacagaatacgccgcgtctgtgaaaggcagattcaccatctcaagagatgattcaaagaactcactgtatctgcaaatgaacagcctgaaaaccgaggacacggcggtgtactactgcgccagagagcctaaatactggatcgacttcgacctatgggggagaggtaccttggtcaccgtctcctcaggagggggcggatcaggcggaggtggatcgggagggggtggtagccccgctgctctgctgcctgcccggggtaccaacatggcccagaagcgtcctgcctgcaccctgaagcctgagtgtgtccagcagctgctggtttgctcccaggaggccaagaagtcagcctactgcccctacagtcactttcctgtgggggctgccctgctcacccaggaggggagaatcttcaaagggtgcaacatagaaaatgcctgctacccgctgggcatctgtgctgaacggaccgctatccagaaggccgtctcagaagggtacaaggatttcagggcaattgctatcgccagtgacatgcaagatgattttatctctccatgtggggcctgcaggcaagtcatgagagagtttggcaccaactggcccgtgtacatgaccaagccggatggtacgtatattcaccatcatcatcaccat

SEQ ID NO: 588 - DNA, 1215 bp, synthetic construct
  source 1..1215: mol_type = other DNA
gacatccagatgacccagtctccatcctccctgtctgcatctgtaggagacagagtcaccatcacttgccgggcaagtcagagcattagcagctatttaaattggtatcagcagaaaccagggaaagcccctaagctcctgatctatgctgcatccagtttgcaaagtggggtcccatcaaggttcagtggcagtggatgcggtacagatttcactctcaccatcagcagtctgcaacctgaagattttgcaacttactactgtcagcaaagctacatcgccccttacacttttggcggagggaccaaggttgagatcaaaggagggggcggatcaggcggaggtggatcgggagggggtggtagcgaggtgcagctggtggagtctgggggaggcttggtccagcctggagggtccctgagactctcctgtgcagcctctggattcaccttcgtagaccacgacatggactgggtccgccaggctccagggaaggggctggagtgggttggccgtactagaaacaaactaggaagttacaccacagaatacgccgcgtctgtgaaaggcagattcaccatctcaagagatgattcaaagaactcactgtatctgcaaatgaacagcctgaaaaccgaggacacggcggtgtactactgcgccagagagcctaaatactggatcgacttcgacctatgggggagaggtaccttggtcaccgtctcctcaggtggaggcggttcgggtggagggggatctggtggcggaggtagcggtggcgggggatcacccgctgctctgctgcctgcccggggtaccaacatggcccagaagcgtcctgcctgcaccctgaagcctgagtgtgtccagcagctgctggtttgctcccaggaggccaagaagtcagcctactgcccctacagtcactttcctgtgggggctgccctgctcacccaggaggggagaatcttcaaagggtgcaacatagaaaatgcctgctacccgctgggcatctgtgctgaacggaccgctatccagaaggccgtctcagaagggtacaaggatttcagggcaattgctatcgccagtgacatgcaagatgattttatctctccatgtggggcctgcaggcaagtcatgagagagtttggcaccaactggcccgtgtacatgaccaagccggatggtacgtatattcaccatcatcatcaccat

SEQ ID NO: 589 - DNA, 1230 bp, synthetic construct
  source 1..1230: mol_type = other DNA
gacatccagatgacccagtctccatcctccctgtctgcatctgtaggagacagagtcaccatcacttgccgggcaagtcagagcattagcagctatttaaattggtatcagcagaaaccagggaaagcccctaagctcctgatctatgctgcatccagtttgcaaagtggggtcccatcaaggttcagtggcagtggatgcggtacagatttcactctcaccatcagcagtctgcaacctgaagattttgcaacttactactgtcagcaaagctacatcgccccttacacttttggcggagggaccaaggttgagatcaaaggagggggcggatcaggcggaggtggatcgggagggggtggtagcgaggtgcagctggtggagtctgggggaggcttggtccagcctggagggtccctgagactctcctgtgcagcctctggattcaccttcgtagaccacgacatggactgggtccgccaggctccagggaaggggctggagtgggttggccgtactagaaacaaactaggaagttacaccacagaatacgccgcgtctgtgaaaggcagattcaccatctcaagagatgattcaaagaactcactgtatctgcaaatgaacagcctgaaaaccgaggacacggcggtgtactactgcgccagagagcctaaatactggatcgacttcgacctatgggggagaggtaccttggtcaccgtctcctcaggtggaggcggttcgggtggagggggatctggtggcggaggtagcggtggcgggggatcaggtggcgggggatcacccgctgctctgctgcctgcccggggtaccaacatggcccagaagcgtcctgcctgcaccctgaagcctgagtgtgtccagcagctgctggtttgctcccaggaggccaagaagtcagcctactgcccctacagtcactttcctgtgggggctgccctgctcacccaggaggggagaatcttcaaagggtgcaacatagaaaatgcctgctacccgctgggcatctgtgctgaacggaccgctatccagaaggccgtctcagaagggtacaaggatttcagggcaattgctatcgccagtgacatgcaagatgattttatctctccatgtggggcctgcaggcaagtcatgagagagtttggcaccaactggcccgtgtacatgaccaagccggatggtacgtatattcaccatcatcatcaccat

SEQ ID NO: 590 - DNA, 1245 bp, synthetic construct
  source 1..1245: mol_type = other DNA
gacatccagatgacccagtctccatcctccctgtctgcatctgtaggagacagagtcaccatcacttgccgggcaagtcagagcattagcagctatttaaattggtatcagcagaaaccagggaaagcccctaagctcctgatctatgctgcatccagtttgcaaagtggggtcccatcaaggttcagtggcagtggatgcggtacagatttcactctcaccatcagcagtctgcaacctgaagattttgcaacttactactgtcagcaaagctacatcgccccttacacttttggcggagggaccaaggttgagatcaaaggagggggcggatcaggcggaggtggatcgggagggggtggtagcgaggtgcagctggtggagtctgggggaggcttggtccagcctggagggtccctgagactctcctgtgcagcctctggattcaccttcgtagaccacgacatggactgggtccgccaggctccagggaaggggctggagtgggttggccgtactagaaacaaactaggaagttacaccacagaatacgccgcgtctgtgaaaggcagattcaccatctcaagagatgattcaaagaactcactgtatctgcaaatgaacagcctgaaaaccgaggacacggcggtgtactactgcgccagagagcctaaatactggatcgacttcgacctatgggggagaggtaccttggtcaccgtctcctcaggtggaggcggttcgggtggagggggatctggtggcggaggtagcggtggcgggggatcaggtggcgggggatcaggtggcgggggatcacccgctgctctgctgcctgcccggggtaccaacatggcccagaagcgtcctgcctgcaccctgaagcctgagtgtgtccagcagctgctggtttgctcccaggaggccaagaagtcagcctactgcccctacagtcactttcctgtgggggctgccctgctcacccaggaggggagaatcttcaaagggtgcaacatagaaaatgcctgctacccgctgggcatctgtgctgaacggaccgctatccagaaggccgtctcagaagggtacaaggatttcagggcaattgctatcgccagtgacatgcaagatgattttatctctccatgtggggcctgcaggcaagtcatgagagagtttggcaccaactggcccgtgtacatgaccaagccggatggtacgtatattcaccatcatcatcaccat

SEQ ID NO: 591 - DNA, 1260 bp, synthetic construct
  source 1..1260: mol_type = other DNA
gacatccagatgacccagtctccatcctccctgtctgcatctgtaggagacagagtcaccatcacttgccgggcaagtcagagcattagcagctatttaaattggtatcagcagaaaccagggaaagcccctaagctcctgatctatgctgcatccagtttgcaaagtggggtcccatcaaggttcagtggcagtggatgcggtacagatttcactctcaccatcagcagtctgcaacctgaagattttgcaacttactactgtcagcaaagctacatcgccccttacacttttggcggagggaccaaggttgagatcaaaggagggggcggatcaggcggaggtggatcgggagggggtggtagcgaggtgcagctggtggagtctgggggaggcttggtccagcctggagggtccctgagactctcctgtgcagcctctggattcaccttcgtagaccacgacatggactgggtccgccaggctccagggaaggggctggagtgggttggccgtactagaaacaaactaggaagttacaccacagaatacgccgcgtctgtgaaaggcagattcaccatctcaagagatgattcaaagaactcactgtatctgcaaatgaacagcctgaaaaccgaggacacggcggtgtactactgcgccagagagcctaaatactggatcgacttcgacctatgggggagaggtaccttggtcaccgtctcctcaggtggaggcggttcgggtggagggggatctggtggcggaggtagcggtggcgggggatcaggtggcgggggatcaggtggcgggggatcaggtggcgggggatcacccgctgctctgctgcctgcccggggtaccaacatggcccagaagcgtcctgcctgcaccctgaagcctgagtgtgtccagcagctgctggtttgctcccaggaggccaagaagtcagcctactgcccctacagtcactttcctgtgggggctgccctgctcacccaggaggggagaatcttcaaagggtgcaacatagaaaatgcctgctacccgctgggcatctgtgctgaacggaccgctatccagaaggccgtctcagaagggtacaaggatttcagggcaattgctatcgccagtgacatgcaagatgattttatctctccatgtggggcctgcaggcaagtcatgagagagtttggcaccaactggcccgtgtacatgaccaagccggatggtacgtatattcaccatcatcatcaccat

SEQ ID NO: 592 - DNA, 1275 bp, synthetic construct
  source 1..1275: mol_type = other DNA
gacatccagatgacccagtctccatcctccctgtctgcatctgtaggagacagagtcaccatcacttgccgggcaagtcagagcattagcagctatttaaattggtatcagcagaaaccagggaaagcccctaagctcctgatctatgctgcatccagtttgcaaagtggggtcccatcaaggttcagtggcagtggatgcggtacagatttcactctcaccatcagcagtctgcaacctgaagattttgcaacttactactgtcagcaaagctacatcgccccttacacttttggcggagggaccaaggttgagatcaaaggagggggcggatcaggcggaggtggatcgggagggggtggtagcgaggtgcagctggtggagtctgggggaggcttggtccagcctggagggtccctgagactctcctgtgcagcctctggattcaccttcgtagaccacgacatggactgggtccgccaggctccagggaaggggctggagtgggttggccgtactagaaacaaactaggaagttacaccacagaatacgccgcgtctgtgaaaggcagattcaccatctcaagagatgattcaaagaactcactgtatctgcaaatgaacagcctgaaaaccgaggacacggcggtgtactactgcgccagagagcctaaatactggatcgacttcgacctatgggggagaggtaccttggtcaccgtctcctcaggtggaggcggttcgggtggagggggatctggtggcggaggtagcggtggcgggggatcaggtggcgggggatcaggtggcgggggatcaggtggcgggggatcaggtggcgggggatcacccgctgctctgctgcctgcccggggtaccaacatggcccagaagcgtcctgcctgcaccctgaagcctgagtgtgtccagcagctgctggtttgctcccaggaggccaagaagtcagcctactgcccctacagtcactttcctgtgggggctgccctgctcacccaggaggggagaatcttcaaagggtgcaacatagaaaatgcctgctacccgctgggcatctgtgctgaacggaccgctatccagaaggccgtctcagaagggtacaaggatttcagggcaattgctatcgccagtgacatgcaagatgattttatctctccatgtggggcctgcaggcaagtcatgagagagtttggcaccaactggcccgtgtacatgaccaagccggatggtacgtatattcaccatcatcatcaccat

SEQ ID NO: 593 - DNA, 1290 bp, synthetic construct
  source 1..1290: mol_type = other DNA
gacatccagatgacccagtctccatcctccctgtctgcatctgtaggagacagagtcaccatcacttgccgggcaagtcagagcattagcagctatttaaattggtatcagcagaaaccagggaaagcccctaagctcctgatctatgctgcatccagtttgcaaagtggggtcccatcaaggttcagtggcagtggatgcggtacagatttcactctcaccatcagcagtctgcaacctgaagattttgcaacttactactgtcagcaaagctacatcgccccttacacttttggcggagggaccaaggttgagatcaaaggagggggcggatcaggcggaggtggatcgggagggggtggtagcgaggtgcagctggtggagtctgggggaggcttggtccagcctggagggtccctgagactctcctgtgcagcctctggattcaccttcgtagaccacgacatggactgggtccgccaggctccagggaaggggctggagtgggttggccgtactagaaacaaactaggaagttacaccacagaatacgccgcgtctgtgaaaggcagattcaccatctcaagagatgattcaaagaactcactgtatctgcaaatgaacagcctgaaaaccgaggacacggcggtgtactactgcgccagagagcctaaatactggatcgacttcgacctatgggggagaggtaccttggtcaccgtctcctcaggtggaggcggttcgggtggagggggatctggtggcggaggtagcggtggcgggggatcaggtggcgggggatcaggtggcgggggatcaggtggcgggggatcaggtggcgggggatcaggtggcgggggatcacccgctgctctgctgcctgcccggggtaccaacatggcccagaagcgtcctgcctgcaccctgaagcctgagtgtgtccagcagctgctggtttgctcccaggaggccaagaagtcagcctactgcccctacagtcactttcctgtgggggctgccctgctcacccaggaggggagaatcttcaaagggtgcaacatagaaaatgcctgctacccgctgggcatctgtgctgaacggaccgctatccagaaggccgtctcagaagggtacaaggatttcagggcaattgctatcgccagtgacatgcaagatgattttatctctccatgtggggcctgcaggcaagtcatgagagagtttggcaccaactggcccgtgtacatgaccaagccggatggtacgtatattcaccatcatcatcaccat

SEQ ID NO: 594 - DNA, 1305 bp, synthetic construct
  source 1..1305: mol_type = other DNA
gacatccagatgacccagtctccatcctccctgtctgcatctgtaggagacagagtcaccatcacttgccgggcaagtcagagcattagcagctatttaaattggtatcagcagaaaccagggaaagcccctaagctcctgatctatgctgcatccagtttgcaaagtggggtcccatcaaggttcagtggcagtggatgcggtacagatttcactctcaccatcagcagtctgcaacctgaagattttgcaacttactactgtcagcaaagctacatcgccccttacacttttggcggagggaccaaggttgagatcaaaggagggggcggatcaggcggaggtggatcgggagggggtggtagcgaggtgcagctggtggagtctgggggaggcttggtccagcctggagggtccctgagactctcctgtgcagcctctggattcaccttcgtagaccacgacatggactgggtccgccaggctccagggaaggggctggagtgggttggccgtactagaaacaaactaggaagttacaccacagaatacgccgcgtctgtgaaaggcagattcaccatctcaagagatgattcaaagaactcactgtatctgcaaatgaacagcctgaaaaccgaggacacggcggtgtactactgcgccagagagcctaaatactggatcgacttcgacctatgggggagaggtaccttggtcaccgtctcctcaggtggaggcggttcgggtggagggggatctggtggcggaggtagcggtggcgggggatcaggtggcgggggatcaggtggcgggggatcaggtggcgggggatcaggtggcgggggatcaggtggcgggggatcaggtggcgggggatcacccgctgctctgctgcctgcccggggtaccaacatggcccagaagcgtcctgcctgcaccctgaagcctgagtgtgtccagcagctgctggtttgctcccaggaggccaagaagtcagcctactgcccctacagtcactttcctgtgggggctgccctgctcacccaggaggggagaatcttcaaagggtgcaacatagaaaatgcctgctacccgctgggcatctgtgctgaacggaccgctatccagaaggccgtctcagaagggtacaaggatttcagggcaattgctatcgccagtgacatgcaagatgattttatctctccatgtggggcctgcaggcaagtcatgagagagtttggcaccaactggcccgtgtacatgaccaagccggatggtacgtatattcaccatcatcatcaccat

SEQ ID NO: 595 - DNA, 1320 bp, synthetic construct
  source 1..1320: mol_type = other DNA
gacatccagatgacccagtctccatcctccctgtctgcatctgtaggagacagagtcaccatcacttgccgggcaagtcagagcattagcagctatttaaattggtatcagcagaaaccagggaaagcccctaagctcctgatctatgctgcatccagtttgcaaagtggggtcccatcaaggttcagtggcagtggatgcggtacagatttcactctcaccatcagcagtctgcaacctgaagattttgcaacttactactgtcagcaaagctacatcgccccttacacttttggcggagggaccaaggttgagatcaaaggagggggcggatcaggcggaggtggatcgggagggggtggtagcgaggtgcagctggtggagtctgggggaggcttggtccagcctggagggtccctgagactctcctgtgcagcctctggattcaccttcgtagaccacgacatggactgggtccgccaggctccagggaaggggctggagtgggttggccgtactagaaacaaactaggaagttacaccacagaatacgccgcgtctgtgaaaggcagattcaccatctcaagagatgattcaaagaactcactgtatctgcaaatgaacagcctgaaaaccgaggacacggcggtgtactactgcgccagagagcctaaatactggatcgacttcgacctatgggggagaggtaccttggtcaccgtctcctcaggtggaggcggttcgggtggagggggatctggtggcggaggtagcggtggcgggggatcaggtggcgggggatcaggtggcgggggatcaggtggcgggggatcaggtggcgggggatcaggtggcgggggatcaggtggcgggggatcaggtggcgggggatcacccgctgctctgctgcctgcccggggtaccaacatggcccagaagcgtcctgcctgcaccctgaagcctgagtgtgtccagcagctgctggtttgctcccaggaggccaagaagtcagcctactgcccctacagtcactttcctgtgggggctgccctgctcacccaggaggggagaatcttcaaagggtgcaacatagaaaatgcctgctacccgctgggcatctgtgctgaacggaccgctatccagaaggccgtctcagaagggtacaaggatttcagggcaattgctatcgccagtgacatgcaagatgattttatctctccatgtggggcctgcaggcaagtcatgagagagtttggcaccaactggcccgtgtacatgaccaagccggatggtacgtatattcaccatcatcatcaccat

SEQ ID NO: 596 - DNA, 1335 bp, synthetic construct
  source 1..1335: mol_type = other DNA
gacatccagatgacccagtctccatcctccctgtctgcatctgtaggagacagagtcaccatcacttgccgggcaagtcagagcattagcagctatttaaattggtatcagcagaaaccagggaaagcccctaagctcctgatctatgctgcatccagtttgcaaagtggggtcccatcaaggttcagtggcagtggatgcggtacagatttcactctcaccatcagcagtctgcaacctgaagattttgcaacttactactgtcagcaaagctacatcgccccttacacttttggcggagggaccaaggttgagatcaaaggagggggcggatcaggcggaggtggatcgggagggggtggtagcgaggtgcagctggtggagtctgggggaggcttggtccagcctggagggtccctgagactctcctgtgcagcctctggattcaccttcgtagaccacgacatggactgggtccgccaggctccagggaaggggctggagtgggttggccgtactagaaacaaactaggaagttacaccacagaatacgccgcgtctgtgaaaggcagattcaccatctcaagagatgattcaaagaactcactgtatctgcaaatgaacagcctgaaaaccgaggacacggcggtgtactactgcgccagagagcctaaatactggatcgacttcgacctatgggggagaggtaccttggtcaccgtctcctcaggtggaggcggttcgggtggagggggatctggtggcggaggtagcggtggcgggggatcaggtggcgggggatcaggtggcgggggatcaggtggcgggggatcaggtggcgggggatcaggtggcgggggatcaggtggcgggggatcaggtggcgggggatcaggtggcgggggatcacccgctgctctgctgcctgcccggggtaccaacatggcccagaagcgtcctgcctgcaccctgaagcctgagtgtgtccagcagctgctggtttgctcccaggaggccaagaagtcagcctactgcccctacagtcactttcctgtgggggctgccctgctcacccaggaggggagaatcttcaaagggtgcaacatagaaaatgcctgctacccgctgggcatctgtgctgaacggaccgctatccagaaggccgtctcagaagggtacaaggatttcagggcaattgctatcgccagtgacatgcaagatgattttatctctccatgtggggcctgcaggcaagtcatgagagagtttggcaccaactggcccgtgtacatgaccaagccggatggtacgtatattcaccatcatcatcaccat

SEQ ID NO: 597 - DNA, 1176 bp, synthetic construct
  source 1..1176: mol_type = other DNA
cccgctgctctgctgcctgcccggggtaccaacatggcccagaagcgtcctgcctgcaccctgaagcctgagtgtgtccagcagctgctggtttgctcccaggaggccaagaagtcagcctactgcccctacagtcactttcctgtgggggctgccctgctcacccaggaggggagaatcttcaaagggtgcaacatagaaaatgcctgctacccgctgggcatctgtgctgaacggaccgctatccagaaggccgtctcagaagggtacaaggatttcagggcaattgctatcgccagtgacatgcaagatgattttatctctccatgtggggcctgcaggcaagtcatgagagagtttggcaccaactggcccgtgtacatgaccaagccggatggtacgtatattggtggcgggggatcagacatccagatgacccagtctccatcttccgtgtctgcatctgtaggagacagagtcaccatcacttgtcgggcgagtcagggtattagcagctggttagcctggtatcagcagaaaccagggaaagcccctaagctcctgatctatgctgcatccagtttgcaaagtggggtcccatcaaggttcagcggcagtggatctgggacagatttcactctcaccatcagcagcctgcagcctgaagattttgcaacttattactgtcagcaaacaaatagtttcccttacacttttggcggagggaccaaggttgagatcaaaggagggggcggatcaggcggaggtggatcgggagggggtggtagcgaggtgcagctgttggagtctgggggaggcttggtacagcctggggggtccctgagactctcctgtgcagcctctggattcacctttagcaattatgccatgagctgggtccgccaggctccagggaaggggctggagtgggtctcagctattagtggtagtggtggtagcacatactacgcagactccgtgaagggccggttcaccatctccagagacaattccaagaacacgctgtatctgcaaatgaacagcctgagagccgaggacacggcggtgtactactgcgccaagggccctcctacataccacacaaactactactacatggacgtatggggcaagggtacaactgtcaccgtctcctcacaccatcatcatcaccat

SEQ ID NO: 598 - DNA, 1176 bp, synthetic construct
  source 1..1176: mol_type = other DNA
cccgctgctctgctgcctgcccggggtaccaacatggcccagaagcgtcctgcctgcaccctgaagcctgagtgtgtccagcagctgctggtttgctcccaggaggccaagaagtcagcctactgcccctacagtcactttcctgtgggggctgccctgctcacccaggaggggagaatcttcaaagggtgcaacatagaaaatgcctgctacccgctgggcatctgtgctgaacggaccgctatccagaaggccgtctcagaagggtacaaggatttcagggcaattgctatcgccagtgacatgcaagatgattttatctctccatgtggggcctgcaggcaagtcatgagagagtttggcaccaactggcccgtgtacatgaccaagccggatggtacgtatattggtggcgggggatcagacatccagatgacccagtctccatcttccgtgtctgcatctgtaggagacagagtcaccatcacttgtcgggcgagtcagggtattagcagctggttagcctggtatcagcagaaaccagggaaagcccctaagctcctgatctatgctgcatccagtttgcaaagtggggtcccatcaaggttcagcggcagtggatctgggacagatttcactctcaccatcagcagcctgcagcctgaagattttgcaacttattactgtcagcaaacaaatagtttcccttacacttttggcggagggaccaaggttgagatcaaaggagggggcggatcaggcggaggtggatcgggagggggtggtagcgaggtgcagctgttggagtctgggggaggcttggtacagcctggggggtccctgagactctcctgtgcagcctctggattcacctttagcagctatgtcatgatctgggtccgccaggctccagggaaggggctggagtgggtctcaagcattagtggtgacagcgtaacaacatactacgcagactccgtgaagggccggttcaccatctccagagacaattccaagaacacgctgtatctgcaaatgaacagcctgagagccgaggacacggcggtgtactactgcgccaagggccctcctacataccacacaaactactactacatggacgtatggggcaagggtacaactgtcaccgtctcctcacaccatcatcatcaccat

SEQ ID NO: 599 - DNA, 1170 bp, synthetic construct
  source 1..1170: mol_type = other DNA
cccgctgctctgctgcctgcccggggtaccaacatggcccagaagcgtcctgcctgcaccctgaagcctgagtgtgtccagcagctgctggtttgctcccaggaggccaagaagtcagcctactgcccctacagtcactttcctgtgggggctgccctgctcacccaggaggggagaatcttcaaagggtgcaacatagaaaatgcctgctacccgctgggcatctgtgctgaacggaccgctatccagaaggccgtctcagaagggtacaaggatttcagggcaattgctatcgccagtgacatgcaagatgattttatctctccatgtggggcctgcaggcaagtcatgagagagtttggcaccaactggcccgtgtacatgaccaagccggatggtacgtatattggtggcgggggatcagacatccagatgacccagtctccatcctccctgtctgcatctgtaggagacagagtcaccatcacttgccgggcaagtcagagcattagcagctatttaaattggtatcagcagaaaccagggaaagcccctaagctcctgatctatgctgcatccagtttgcaaagtggggtcccatcaaggttcagtggcagtggatctgggacagatttcactctcaccatcagcagtctgcaacctgaagattttgcaacttactactgtcagcaaagctacatcgccccttacacttttggcggagggaccaaggttgagatcaaaggagggggcggatcaggcggaggtggatcgggagggggtggtagcgaggtgcagctggtggagtctgggggaggcttggtccagcctggagggtccctgagactctcctgtgcagcctctggattcaccttcagtgaccactacatggactgggtccgccaggctccagggaaggggctggagtgggttggccgtactagaaacaaagctagtagttacaccacagaatacgccgcgtctgtgaaaggcagattcaccatctcaagagatgattcaaagaactcactgtatctgcaaatgaacagcctgaaaaccgaggacacggcggtgtactactgcgccagagagcctaaatactggatcgacttcgacctatgggggagaggtaccttggtcaccgtctcctcacaccatcatcatcaccat

SEQ ID NO: 600 - DNA, 1143 bp, synthetic construct
  source 1..1143: mol_type = other DNA
cccgctgctctgctgcctgcccggggtaccaacatggcccagaagcgtcctgcctgcaccctgaagcctgagtgtgtccagcagctgctggtttgctcccaggaggccaagaagtcagcctactgcccctacagtcactttcctgtgggggctgccctgctcacccaggaggggagaatcttcaaagggtgcaacatagaaaatgcctgctacccgctgggcatctgtgctgaacggaccgctatccagaaggccgtctcagaagggtacaaggatttcagggcaattgctatcgccagtgacatgcaagatgattttatctctccatgtggggcctgcaggcaagtcatgagagagtttggcaccaactggcccgtgtacatgaccaagccggatggtacgtatattggtggcgggggatcagacatccagatgacccagtctccatcctccctgtctgcatctgtaggagacagagtcaccatcacttgccgggcaagtcagagcattagcagctatttaaattggtatcagcagaaaccagggaaagcccctaagctcctgatctatgctgcatccagtttgcaaagtggggtcccatcaaggttcagtggcagtggatctgggacagatttcactctcaccatcagcagtctgcaacctgaagattttgcaacttactactgtcagcaaagctacatcgccccttacacttttggcggagggaccaaggttgagatcaaaggagggggcggatcaggcggaggtggatcgggagggggtggtagcgaggtgcagctggtggagtctgggggaggcttggtacagccagggcggtccctgagactctcctgtacagcttctggattcaccttcagtgaccacgacatgaactgggtccgccaggctccagggaaggggctggagtgggttggccgtactagaaacgccgctggaagttacaccacagaatacgccgcgtctgtgaaaggcagattcaccatctcaagagatgattcaaagaactcactgtatctgcaaatgaacagcctgaaaaccgaggacacggcggtgtactactgcgccagagagcctaaatactggatcgacttcgacctatgggggcaccatcatcatcaccat

SEQ ID NO: 601 - DNA, 1170 bp, synthetic construct
  source 1..1170: mol_type = other DNA
cccgctgctctgctgcctgcccggggtaccaacatggcccagaagcgtcctgcctgcaccctgaagcctgagtgtgtccagcagctgctggtttgctcccaggaggccaagaagtcagcctactgcccctacagtcactttcctgtgggggctgccctgctcacccaggaggggagaatcttcaaagggtgcaacatagaaaatgcctgctacccgctgggcatctgtgctgaacggaccgctatccagaaggccgtctcagaagggtacaaggatttcagggcaattgctatcgccagtgacatgcaagatgattttatctctccatgtggggcctgcaggcaagtcatgagagagtttggcaccaactggcccgtgtacatgaccaagccggatggtacgtatattggtggcgggggatcagaggtgcagctggtggagtctgggggaggcttggtccagcctggagggtccctgagactctcctgtgcagcctctggattcaccttcgtagaccacgacatggactgggtccgccaggctccagggaaggggctggagtgggttggccgtactagaaacaaactaggaagttacaccacagaatacgccgcgtctgtgaaaggcagattcaccatctcaagagatgattcaaagaactcactgtatctgcaaatgaacagcctgaaaaccgaggacacggcggtgtactactgcgccagagagcctaaatactggatcgacttcgacctatgggggagaggtaccttggtcaccgtctcctcaggagggggcggatcaggcggaggtggatcgggagggggtggtagcgacatccagatgacccagtctccatcctccctgtctgcatctgtaggagacagagtcaccatcacttgccgggcaagtcagagcattagcagctatttaaattggtatcagcagaaaccagggaaagcccctaagctcctgatctatgctgcatccagtttgcaaagtggggtcccatcaaggttcagtggcagtggatgcggtacagatttcactctcaccatcagcagtctgcaacctgaagattttgcaacttactactgtcagcaaagctacatcgccccttacacttttggcggagggaccaaggttgagatcaaacaccatcatcatcaccat

SEQ ID NO: 602 - DNA, 1206 bp, synthetic construct
  source 1..1206: mol_type = other DNA
cccgctgctctgctgcctgcccggggtaccaacatggcccagaagcgtcctgcctgcaccctgaagcctgagtgtgtccagcagctgctggtttgctcccaggaggccaagaagtcagcctactgcccctacagtcactttcctgtgggggctgccctgctcacccaggaggggagaatcttcaaagggtgcaacatagaaaatgcctgctacccgctgggcatctgtgctgaacggaccgctatccagaaggccgtctcagaagggtacaaggatttcagggcaattgctatcgccagtgacatgcaagatgattttatctctccatgtggggcctgcaggcaagtcatgagagagtttggcaccaactggcccgtgtacatgaccaagccggatggtacgtatattggagggggcggatcaggcggaggtggatcgggagggggtggtagcgacatccagatgacccagtctccatcttccgtgtctgcatctgtaggagacagagtcaccatcacttgtcgggcgagtcagggtattagcagctggttagcctggtatcagcagaaaccagggaaagcccctaagctcctgatctatgctgcatccagtttgcaaagtggggtcccatcaaggttcagcggcagtggatctgggacagatttcactctcaccatcagcagcctgcagcctgaagattttgcaacttattactgtcagcaaacaaatagtttcccttacacttttggcggagggaccaaggttgagatcaaaggagggggcggatcaggcggaggtggatcgggagggggtggtagcgaggtgcagctgttggagtctgggggaggcttggtacagcctggggggtccctgagactctcctgtgcagcctctggattcacctttagcaattatgccatgagctgggtccgccaggctccagggaaggggctggagtgggtctcagctattagtggtagtggtggtagcacatactacgcagactccgtgaagggccggttcaccatctccagagacaattccaagaacacgctgtatctgcaaatgaacagcctgagagccgaggacacggcggtgtactactgcgccaagggccctcctacataccacacaaactactactacatggacgtatggggcaagggtacaactgtcaccgtctcctcacaccatcatcatcaccat

SEQ ID NO: 603 - DNA, 1206 bp, synthetic construct
  source 1..1206: mol_type = other DNA
cccgctgctctgctgcctgcccggggtaccaacatggcccagaagcgtcctgcctgcaccctgaagcctgagtgtgtccagcagctgctggtttgctcccaggaggccaagaagtcagcctactgcccctacagtcactttcctgtgggggctgccctgctcacccaggaggggagaatcttcaaagggtgcaacatagaaaatgcctgctacccgctgggcatctgtgctgaacggaccgctatccagaaggccgtctcagaagggtacaaggatttcagggcaattgctatcgccagtgacatgcaagatgattttatctctccatgtggggcctgcaggcaagtcatgagagagtttggcaccaactggcccgtgtacatgaccaagccggatggtacgtatattggagggggcggatcaggcggaggtggatcgggagggggtggtagcgacatccagatgacccagtctccatcttccgtgtctgcatctgtaggagacagagtcaccatcacttgtcgggcgagtcagggtattagcagctggttagcctggtatcagcagaaaccagggaaagcccctaagctcctgatctatgctgcatccagtttgcaaagtggggtcccatcaaggttcagcggcagtggatctgggacagatttcactctcaccatcagcagcctgcagcctgaagattttgcaacttattactgtcagcaaacaaatagtttcccttacacttttggcggagggaccaaggttgagatcaaaggagggggcggatcaggcggaggtggatcgggagggggtggtagcgaggtgcagctgttggagtctgggggaggcttggtacagcctggggggtccctgagactctcctgtgcagcctctggattcacctttagcagctatgtcatgatctgggtccgccaggctccagggaaggggctggagtgggtctcaagcattagtggtgacagcgtaacaacatactacgcagactccgtgaagggccggttcaccatctccagagacaattccaagaacacgctgtatctgcaaatgaacagcctgagagccgaggacacggcggtgtactactgcgccaagggccctcctacataccacacaaactactactacatggacgtatggggcaagggtacaactgtcaccgtctcctcacaccatcatcatcaccat

SEQ ID NO: 604 - DNA, 1200 bp, synthetic construct
  source 1..1200: mol_type = other DNA
cccgctgctctgctgcctgcccggggtaccaacatggcccagaagcgtcctgcctgcaccctgaagcctgagtgtgtccagcagctgctggtttgctcccaggaggccaagaagtcagcctactgcccctacagtcactttcctgtgggggctgccctgctcacccaggaggggagaatcttcaaagggtgcaacatagaaaatgcctgctacccgctgggcatctgtgctgaacggaccgctatccagaaggccgtctcagaagggtacaaggatttcagggcaattgctatcgccagtgacatgcaagatgattttatctctccatgtggggcctgcaggcaagtcatgagagagtttggcaccaactggcccgtgtacatgaccaagccggatggtacgtatattggagggggcggatcaggcggaggtggatcgggagggggtggtagcgacatccagatgacccagtctccatcctccctgtctgcatctgtaggagacagagtcaccatcacttgccgggcaagtcagagcattagcagctatttaaattggtatcagcagaaaccagggaaagcccctaagctcctgatctatgctgcatccagtttgcaaagtggggtcccatcaaggttcagtggcagtggatctgggacagatttcactctcaccatcagcagtctgcaacctgaagattttgcaacttactactgtcagcaaagctacatcgccccttacacttttggcggagggaccaaggttgagatcaaaggagggggcggatcaggcggaggtggatcgggagggggtggtagcgaggtgcagctggtggagtctgggggaggcttggtccagcctggagggtccctgagactctcctgtgcagcctctggattcaccttcagtgaccactacatggactgggtccgccaggctccagggaaggggctggagtgggttggccgtactagaaacaaagctagtagttacaccacagaatacgccgcgtctgtgaaaggcagattcaccatctcaagagatgattcaaagaactcactgtatctgcaaatgaacagcctgaaaaccgaggacacggcggtgtactactgcgccagagagcctaaatactggatcgacttcgacctatgggggagaggtaccttggtcaccgtctcctcacaccatcatcatcaccat

SEQ ID NO: 605 - DNA, 1173 bp, synthetic construct
  source 1..1173: mol_type = other DNA
cccgctgctctgctgcctgcccggggtaccaacatggcccagaagcgtcctgcctgcaccctgaagcctgagtgtgtccagcagctgctggtttgctcccaggaggccaagaagtcagcctactgcccctacagtcactttcctgtgggggctgccctgctcacccaggaggggagaatcttcaaagggtgcaacatagaaaatgcctgctacccgctgggcatctgtgctgaacggaccgctatccagaaggccgtctcagaagggtacaaggatttcagggcaattgctatcgccagtgacatgcaagatgattttatctctccatgtggggcctgcaggcaagtcatgagagagtttggcaccaactggcccgtgtacatgaccaagccggatggtacgtatattggagggggcggatcaggcggaggtggatcgggagggggtggtagcgacatccagatgacccagtctccatcctccctgtctgcatctgtaggagacagagtcaccatcacttgccgggcaagtcagagcattagcagctatttaaattggtatcagcagaaaccagggaaagcccctaagctcctgatctatgctgcatccagtttgcaaagtggggtcccatcaaggttcagtggcagtggatctgggacagatttcactctcaccatcagcagtctgcaacctgaagattttgcaacttactactgtcagcaaagctacatcgccccttacacttttggcggagggaccaaggttgagatcaaaggagggggcggatcaggcggaggtggatcgggagggggtggtagcgaggtgcagctggtggagtctgggggaggcttggtacagccagggcggtccctgagactctcctgtacagcttctggattcaccttcagtgaccacgacatgaactgggtccgccaggctccagggaaggggctggagtgggttggccgtactagaaacgccgctggaagttacaccacagaatacgccgcgtctgtgaaaggcagattcaccatctcaagagatgattcaaagaactcactgtatctgcaaatgaacagcctgaaaaccgaggacacggcggtgtactactgcgccagagagcctaaatactggatcgacttcgacctatgggggcaccatcatcatcaccat

SEQ ID NO: 606 - DNA, 1200 bp, synthetic construct
  source 1..1200: mol_type = other DNA
cccgctgctctgctgcctgcccggggtaccaacatggcccagaagcgtcctgcctgcaccctgaagcctgagtgtgtccagcagctgctggtttgctcccaggaggccaagaagtcagcctactgcccctacagtcactttcctgtgggggctgccctgctcacccaggaggggagaatcttcaaagggtgcaacatagaaaatgcctgctacccgctgggcatctgtgctgaacggaccgctatccagaaggccgtctcagaagggtacaaggatttcagggcaattgctatcgccagtgacatgcaagatgattttatctctccatgtggggcctgcaggcaagtcatgagagagtttggcaccaactggcccgtgtacatgaccaagccggatggtacgtatattggagggggcggatcaggcggaggtggatcgggagggggtggtagcgaggtgcagctggtggagtctgggggaggcttggtccagcctggagggtccctgagactctcctgtgcagcctctggattcaccttcgtagaccacgacatggactgggtccgccaggctccagggaaggggctggagtgggttggccgtactagaaacaaactaggaagttacaccacagaatacgccgcgtctgtgaaaggcagattcaccatctcaagagatgattcaaagaactcactgtatctgcaaatgaacagcctgaaaaccgaggacacggcggtgtactactgcgccagagagcctaaatactggatcgacttcgacctatgggggagaggtaccttggtcaccgtctcctcaggagggggcggatcaggcggaggtggatcgggagggggtggtagcgacatccagatgacccagtctccatcctccctgtctgcatctgtaggagacagagtcaccatcacttgccgggcaagtcagagcattagcagctatttaaattggtatcagcagaaaccagggaaagcccctaagctcctgatctatgctgcatccagtttgcaaagtggggtcccatcaaggttcagtggcagtggatgcggtacagatttcactctcaccatcagcagtctgcaacctgaagattttgcaacttactactgtcagcaaagctacatcgccccttacacttttggcggagggaccaaggttgagatcaaacaccatcatcatcaccat

SEQ ID NO: 607 - DNA, 1221 bp, synthetic construct
  source 1..1221: mol_type = other DNA
cccgctgctctgctgcctgcccggggtaccaacatggcccagaagcgtcctgcctgcaccctgaagcctgagtgtgtccagcagctgctggtttgctcccaggaggccaagaagtcagcctactgcccctacagtcactttcctgtgggggctgccctgctcacccaggaggggagaatcttcaaagggtgcaacatagaaaatgcctgctacccgctgggcatctgtgctgaacggaccgctatccagaaggccgtctcagaagggtacaaggatttcagggcaattgctatcgccagtgacatgcaagatgattttatctctccatgtggggcctgcaggcaagtcatgagagagtttggcaccaactggcccgtgtacatgaccaagccggatggtacgtatattggtggaggcggttcgggtggagggggatctggtggcggaggtagcggtggcgggggatcagacatccagatgacccagtctccatcttccgtgtctgcatctgtaggagacagagtcaccatcacttgtcgggcgagtcagggtattagcagctggttagcctggtatcagcagaaaccagggaaagcccctaagctcctgatctatgctgcatccagtttgcaaagtggggtcccatcaaggttcagcggcagtggatctgggacagatttcactctcaccatcagcagcctgcagcctgaagattttgcaacttattactgtcagcaaacaaatagtttcccttacacttttggcggagggaccaaggttgagatcaaaggagggggcggatcaggcggaggtggatcgggagggggtggtagcgaggtgcagctgttggagtctgggggaggcttggtacagcctggggggtccctgagactctcctgtgcagcctctggattcacctttagcaattatgccatgagctgggtccgccaggctccagggaaggggctggagtgggtctcagctattagtggtagtggtggtagcacatactacgcagactccgtgaagggccggttcaccatctccagagacaattccaagaacacgctgtatctgcaaatgaacagcctgagagccgaggacacggcggtgtactactgcgccaagggccctcctacataccacacaaactactactacatggacgtatggggcaagggtacaactgtcaccgtctcctcacaccatcatcatcaccat

SEQ ID NO: 608 - DNA, 1221 bp, synthetic construct
  source 1..1221: mol_type = other DNA
cccgctgctctgctgcctgcccggggtaccaacatggcccagaagcgtcctgcctgcaccctgaagcctgagtgtgtccagcagctgctggtttgctcccaggaggccaagaagtcagcctactgcccctacagtcactttcctgtgggggctgccctgctcacccaggaggggagaatcttcaaagggtgcaacatagaaaatgcctgctacccgctgggcatctgtgctgaacggaccgctatccagaaggccgtctcagaagggtacaaggatttcagggcaattgctatcgccagtgacatgcaagatgattttatctctccatgtggggcctgcaggcaagtcatgagagagtttggcaccaactggcccgtgtacatgaccaagccggatggtacgtatattggtggaggcggttcgggtggagggggatctggtggcggaggtagcggtggcgggggatcagacatccagatgacccagtctccatcttccgtgtctgcatctgtaggagacagagtcaccatcacttgtcgggcgagtcagggtattagcagctggttagcctggtatcagcagaaaccagggaaagcccctaagctcctgatctatgctgcatccagtttgcaaagtggggtcccatcaaggttcagcggcagtggatctgggacagatttcactctcaccatcagcagcctgcagcctgaagattttgcaacttattactgtcagcaaacaaatagtttcccttacacttttggcggagggaccaaggttgagatcaaaggagggggcggatcaggcggaggtggatcgggagggggtggtagcgaggtgcagctgttggagtctgggggaggcttggtacagcctggggggtccctgagactctcctgtgcagcctctggattcacctttagcagctatgtcatgatctgggtccgccaggctccagggaaggggctggagtgggtctcaagcattagtggtgacagcgtaacaacatactacgcagactccgtgaagggccggttcaccatctccagagacaattccaagaacacgctgtatctgcaaatgaacagcctgagagccgaggacacggcggtgtactactgcgccaagggccctcctacataccacacaaactactactacatggacgtatggggcaagggtacaactgtcaccgtctcctcacaccatcatcatcaccat

SEQ ID NO: 609 - DNA, 1215 bp, synthetic construct
  source 1..1215: mol_type = other DNA
cccgctgctctgctgcctgcccggggtaccaacatggcccagaagcgtcctgcctgcaccctgaagcctgagtgtgtccagcagctgctggtttgctcccaggaggccaagaagtcagcctactgcccctacagtcactttcctgtgggggctgccctgctcacccaggaggggagaatcttcaaagggtgcaacatagaaaatgcctgctacccgctgggcatctgtgctgaacggaccgctatccagaaggccgtctcagaagggtacaaggatttcagggcaattgctatcgccagtgacatgcaagatgattttatctctccatgtggggcctgcaggcaagtcatgagagagtttggcaccaactggcccgtgtacatgaccaagccggatggtacgtatattggtggaggcggttcgggtggagggggatctggtggcggaggtagcggtggcgggggatcagacatccagatgacccagtctccatcctccctgtctgcatctgtaggagacagagtcaccatcacttgccgggcaagtcagagcattagcagctatttaaattggtatcagcagaaaccagggaaagcccctaagctcctgatctatgctgcatccagtttgcaaagtggggtcccatcaaggttcagtggcagtggatctgggacagatttcactctcaccatcagcagtctgcaacctgaagattttgcaacttactactgtcagcaaagctacatcgccccttacacttttggcggagggaccaaggttgagatcaaaggagggggcggatcaggcggaggtggatcgggagggggtggtagcgaggtgcagctggtggagtctgggggaggcttggtccagcctggagggtccctgagactctcctgtgcagcctctggattcaccttcagtgaccactacatggactgggtccgccaggctccagggaaggggctggagtgggttggccgtactagaaacaaagctagtagttacaccacagaatacgccgcgtctgtgaaaggcagattcaccatctcaagagatgattcaaagaactcactgtatctgcaaatgaacagcctgaaaaccgaggacacggcggtgtactactgcgccagagagcctaaatactggatcgacttcgacctatgggggagaggtaccttggtcaccgtctcctcacaccatcatcatcaccat

SEQ ID NO: 610 - DNA, 1188 bp, synthetic construct
  source 1..1188: mol_type = other DNA
cccgctgctctgctgcctgcccggggtaccaacatggcccagaagcgtcctgcctgcaccctgaagcctgagtgtgtccagcagctgctggtttgctcccaggaggccaagaagtcagcctactgcccctacagtcactttcctgtgggggctgccctgctcacccaggaggggagaatcttcaaagggtgcaacatagaaaatgcctgctacccgctgggcatctgtgctgaacggaccgctatccagaaggccgtctcagaagggtacaaggatttcagggcaattgctatcgccagtgacatgcaagatgattttatctctccatgtggggcctgcaggcaagtcatgagagagtttggcaccaactggcccgtgtacatgaccaagccggatggtacgtatattggtggaggcggttcgggtggagggggatctggtggcggaggtagcggtggcgggggatcagacatccagatgacccagtctccatcctccctgtctgcatctgtaggagacagagtcaccatcacttgccgggcaagtcagagcattagcagctatttaaattggtatcagcagaaaccagggaaagcccctaagctcctgatctatgctgcatccagtttgcaaagtggggtcccatcaaggttcagtggcagtggatctgggacagatttcactctcaccatcagcagtctgcaacctgaagattttgcaacttactactgtcagcaaagctacatcgccccttacacttttggcggagggaccaaggttgagatcaaaggagggggcggatcaggcggaggtggatcgggagggggtggtagcgaggtgcagctggtggagtctgggggaggcttggtacagccagggcggtccctgagactctcctgtacagcttctggattcaccttcagtgaccacgacatgaactgggtccgccaggctccagggaaggggctggagtgggttggccgtactagaaacgccgctggaagttacaccacagaatacgccgcgtctgtgaaaggcagattcaccatctcaagagatgattcaaagaactcactgtatctgcaaatgaacagcctgaaaaccgaggacacggcggtgtactactgcgccagagagcctaaatactggatcgacttcgacctatgggggcaccatcatcatcaccat

SEQ ID NO: 611 - DNA, 1215 bp, synthetic construct
  source 1..1215: mol_type = other DNA
cccgctgctctgctgcctgcccggggtaccaacatggcccagaagcgtcctgcctgcaccctgaagcctgagtgtgtccagcagctgctggtttgctcccaggaggccaagaagtcagcctactgcccctacagtcactttcctgtgggggctgccctgctcacccaggaggggagaatcttcaaagggtgcaacatagaaaatgcctgctacccgctgggcatctgtgctgaacggaccgctatccagaaggccgtctcagaagggtacaaggatttcagggcaattgctatcgccagtgacatgcaagatgattttatctctccatgtggggcctgcaggcaagtcatgagagagtttggcaccaactggcccgtgtacatgaccaagccggatggtacgtatattggtggaggcggttcgggtggagggggatctggtggcggaggtagcggtggcgggggatcagaggtgcagctggtggagtctgggggaggcttggtccagcctggagggtccctgagactctcctgtgcagcctctggattcaccttcgtagaccacgacatggactgggtccgccaggctccagggaaggggctggagtgggttggccgtactagaaacaaactaggaagttacaccacagaatacgccgcgtctgtgaaaggcagattcaccatctcaagagatgattcaaagaactcactgtatctgcaaatgaacagcctgaaaaccgaggacacggcggtgtactactgcgccagagagcctaaatactggatcgacttcgacctatgggggagaggtaccttggtcaccgtctcctcaggagggggcggatcaggcggaggtggatcgggagggggtggtagcgacatccagatgacccagtctccatcctccctgtctgcatctgtaggagacagagtcaccatcacttgccgggcaagtcagagcattagcagctatttaaattggtatcagcagaaaccagggaaagcccctaagctcctgatctatgctgcatccagtttgcaaagtggggtcccatcaaggttcagtggcagtggatgcggtacagatttcactctcaccatcagcagtctgcaacctgaagattttgcaacttactactgtcagcaaagctacatcgccccttacacttttggcggagggaccaaggttgagatcaaacaccatcatcatcaccat

SEQ ID NO: 612 - DNA, 1236 bp, synthetic construct
  source 1..1236: mol_type = other DNA
cccgctgctctgctgcctgcccggggtaccaacatggcccagaagcgtcctgcctgcaccctgaagcctgagtgtgtccagcagctgctggtttgctcccaggaggccaagaagtcagcctactgcccctacagtcactttcctgtgggggctgccctgctcacccaggaggggagaatcttcaaagggtgcaacatagaaaatgcctgctacccgctgggcatctgtgctgaacggaccgctatccagaaggccgtctcagaagggtacaaggatttcagggcaattgctatcgccagtgacatgcaagatgattttatctctccatgtggggcctgcaggcaagtcatgagagagtttggcaccaactggcccgtgtacatgaccaagccggatggtacgtatattggtggaggcggttcgggtggagggggatctggtggcggaggtagcggtggcgggggatcaggtggcgggggatcagacatccagatgacccagtctccatcttccgtgtctgcatctgtaggagacagagtcaccatcacttgtcgggcgagtcagggtattagcagctggttagcctggtatcagcagaaaccagggaaagcccctaagctcctgatctatgctgcatccagtttgcaaagtggggtcccatcaaggttcagcggcagtggatctgggacagatttcactctcaccatcagcagcctgcagcctgaagattttgcaacttattactgtcagcaaacaaatagtttcccttacacttttggcggagggaccaaggttgagatcaaaggagggggcggatcaggcggaggtggatcgggagggggtggtagcgaggtgcagctgttggagtctgggggaggcttggtacagcctggggggtccctgagactctcctgtgcagcctctggattcacctttagcaattatgccatgagctgggtccgccaggctccagggaaggggctggagtgggtctcagctattagtggtagtggtggtagcacatactacgcagactccgtgaagggccggttcaccatctccagagacaattccaagaacacgctgtatctgcaaatgaacagcctgagagccgaggacacggcggtgtactactgcgccaagggccctcctacataccacacaaactactactacatggacgtatggggcaagggtacaactgtcaccgtctcctcacaccatcatcatcaccat

SEQ ID NO: 613 - DNA, 1236 bp, synthetic construct
  source 1..1236: mol_type = other DNA
cccgctgctctgctgcctgcccggggtaccaacatggcccagaagcgtcctgcctgcaccctgaagcctgagtgtgtccagcagctgctggtttgctcccaggaggccaagaagtcagcctactgcccctacagtcactttcctgtgggggctgccctgctcacccaggaggggagaatcttcaaagggtgcaacatagaaaatgcctgctacccgctgggcatctgtgctgaacggaccgctatccagaaggccgtctcagaagggtacaaggatttcagggcaattgctatcgccagtgacatgcaagatgattttatctctccatgtggggcctgcaggcaagtcatgagagagtttggcaccaactggcccgtgtacatgaccaagccggatggtacgtatattggtggaggcggttcgggtggagggggatctggtggcggaggtagcggtggcgggggatcaggtggcgggggatcagacatccagatgacccagtctccatcttccgtgtctgcatctgtaggagacagagtcaccatcacttgtcgggcgagtcagggtattagcagctggttagcctggtatcagcagaaaccagggaaagcccctaagctcctgatctatgctgcatccagtttgcaaagtggggtcccatcaaggttcagcggcagtggatctgggacagatttcactctcaccatcagcagcctgcagcctgaagattttgcaacttattactgtcagcaaacaaatagtttcccttacacttttggcggagggaccaaggttgagatcaaaggagggggcggatcaggcggaggtggatcgggagggggtggtagcgaggtgcagctgttggagtctgggggaggcttggtacagcctggggggtccctgagactctcctgtgcagcctctggattcacctttagcagctatgtcatgatctgggtccgccaggctccagggaaggggctggagtgggtctcaagcattagtggtgacagcgtaacaacatactacgcagactccgtgaagggccggttcaccatctccagagacaattccaagaacacgctgtatctgcaaatgaacagcctgagagccgaggacacggcggtgtactactgcgccaagggccctcctacataccacacaaactactactacatggacgtatggggcaagggtacaactgtcaccgtctcctcacaccatcatcatcaccat

SEQ ID NO: 614 - DNA, 1230 bp, synthetic construct
  source 1..1230: mol_type = other DNA
cccgctgctctgctgcctgcccggggtaccaacatggcccagaagcgtcctgcctgcaccctgaagcctgagtgtgtccagcagctgctggtttgctcccaggaggccaagaagtcagcctactgcccctacagtcactttcctgtgggggctgccctgctcacccaggaggggagaatcttcaaagggtgcaacatagaaaatgcctgctacccgctgggcatctgtgctgaacggaccgctatccagaaggccgtctcagaagggtacaaggatttcagggcaattgctatcgccagtgacatgcaagatgattttatctctccatgtggggcctgcaggcaagtcatgagagagtttggcaccaactggcccgtgtacatgaccaagccggatggtacgtatattggtggaggcggttcgggtggagggggatctggtggcggaggtagcggtggcgggggatcaggtggcgggggatcagacatccagatgacccagtctccatcctccctgtctgcatctgtaggagacagagtcaccatcacttgccgggcaagtcagagcattagcagctatttaaattggtatcagcagaaaccagggaaagcccctaagctcctgatctatgctgcatccagtttgcaaagtggggtcccatcaaggttcagtggcagtggatctgggacagatttcactctcaccatcagcagtctgcaacctgaagattttgcaacttactactgtcagcaaagctacatcgccccttacacttttggcggagggaccaaggttgagatcaaaggagggggcggatcaggcggaggtggatcgggagggggtggtagcgaggtgcagctggtggagtctgggggaggcttggtccagcctggagggtccctgagactctcctgtgcagcctctggattcaccttcagtgaccactacatggactgggtccgccaggctccagggaaggggctggagtgggttggccgtactagaaacaaagctagtagttacaccacagaatacgccgcgtctgtgaaaggcagattcaccatctcaagagatgattcaaagaactcactgtatctgcaaatgaacagcctgaaaaccgaggacacggcggtgtactactgcgccagagagcctaaatactggatcgacttcgacctatgggggagaggtaccttggtcaccgtctcctcacaccatcatcatcaccat

SEQ ID NO: 615 - DNA, 1203 bp, synthetic construct
  source 1..1203: mol_type = other DNA
cccgctgctctgctgcctgcccggggtaccaacatggcccagaagcgtcctgcctgcaccctgaagcctgagtgtgtccagcagctgctggtttgctcccaggaggccaagaagtcagcctactgcccctacagtcactttcctgtgggggctgccctgctcacccaggaggggagaatcttcaaagggtgcaacatagaaaatgcctgctacccgctgggcatctgtgctgaacggaccgctatccagaaggccgtctcagaagggtacaaggatttcagggcaattgctatcgccagtgacatgcaagatgattttatctctccatgtggggcctgcaggcaagtcatgagagagtttggcaccaactggcccgtgtacatgaccaagccggatggtacgtatattggtggaggcggttcgggtggagggggatctggtggcggaggtagcggtggcgggggatcaggtggcgggggatcagacatccagatgacccagtctccatcctccctgtctgcatctgtaggagacagagtcaccatcacttgccgggcaagtcagagcattagcagctatttaaattggtatcagcagaaaccagggaaagcccctaagctcctgatctatgctgcatccagtttgcaaagtggggtcccatcaaggttcagtggcagtggatctgggacagatttcactctcaccatcagcagtctgcaacctgaagattttgcaacttactactgtcagcaaagctacatcgccccttacacttttggcggagggaccaaggttgagatcaaaggagggggcggatcaggcggaggtggatcgggagggggtggtagcgaggtgcagctggtggagtctgggggaggcttggtacagccagggcggtccctgagactctcctgtacagcttctggattcaccttcagtgaccacgacatgaactgggtccgccaggctccagggaaggggctggagtgggttggccgtactagaaacgccgctggaagttacaccacagaatacgccgcgtctgtgaaaggcagattcaccatctcaagagatgattcaaagaactcactgtatctgcaaatgaacagcctgaaaaccgaggacacggcggtgtactactgcgccagagagcctaaatactggatcgacttcgacctatgggggcaccatcatcatcaccat

SEQ ID NO: 616 - DNA, 1230 bp, synthetic construct
  source 1..1230: mol_type = other DNA
cccgctgctctgctgcctgcccggggtaccaacatggcccagaagcgtcctgcctgcaccctgaagcctgagtgtgtccagcagctgctggtttgctcccaggaggccaagaagtcagcctactgcccctacagtcactttcctgtgggggctgccctgctcacccaggaggggagaatcttcaaagggtgcaacatagaaaatgcctgctacccgctgggcatctgtgctgaacggaccgctatccagaaggccgtctcagaagggtacaaggatttcagggcaattgctatcgccagtgacatgcaagatgattttatctctccatgtggggcctgcaggcaagtcatgagagagtttggcaccaactggcccgtgtacatgaccaagccggatggtacgtatattggtggaggcggttcgggtggagggggatctggtggcggaggtagcggtggcgggggatcaggtggcgggggatcagaggtgcagctggtggagtctgggggaggcttggtccagcctggagggtccctgagactctcctgtgcagcctctggattcaccttcgtagaccacgacatggactgggtccgccaggctccagggaaggggctggagtgggttggccgtactagaaacaaactaggaagttacaccacagaatacgccgcgtctgtgaaaggcagattcaccatctcaagagatgattcaaagaactcactgtatctgcaaatgaacagcctgaaaaccgaggacacggcggtgtactactgcgccagagagcctaaatactggatcgacttcgacctatgggggagaggtaccttggtcaccgtctcctcaggagggggcggatcaggcggaggtggatcgggagggggtggtagcgacatccagatgacccagtctccatcctccctgtctgcatctgtaggagacagagtcaccatcacttgccgggcaagtcagagcattagcagctatttaaattggtatcagcagaaaccagggaaagcccctaagctcctgatctatgctgcatccagtttgcaaagtggggtcccatcaaggttcagtggcagtggatgcggtacagatttcactctcaccatcagcagtctgcaacctgaagattttgcaacttactactgtcagcaaagctacatcgccccttacacttttggcggagggaccaaggttgagatcaaacaccatcatcatcaccat

SEQ ID NO: 617 - DNA, 1251 bp, synthetic construct
  source 1..1251: mol_type = other DNA
cccgctgctctgctgcctgcccggggtaccaacatggcccagaagcgtcctgcctgcaccctgaagcctgagtgtgtccagcagctgctggtttgctcccaggaggccaagaagtcagcctactgcccctacagtcactttcctgtgggggctgccctgctcacccaggaggggagaatcttcaaagggtgcaacatagaaaatgcctgctacccgctgggcatctgtgctgaacggaccgctatccagaaggccgtctcagaagggtacaaggatttcagggcaattgctatcgccagtgacatgcaagatgattttatctctccatgtggggcctgcaggcaagtcatgagagagtttggcaccaactggcccgtgtacatgaccaagccggatggtacgtatattggtggaggcggttcgggtggagggggatctggtggcggaggtagcggtggcgggggatcaggtggcgggggatcaggtggcgggggatcagacatccagatgacccagtctccatcttccgtgtctgcatctgtaggagacagagtcaccatcacttgtcgggcgagtcagggtattagcagctggttagcctggtatcagcagaaaccagggaaagcccctaagctcctgatctatgctgcatccagtttgcaaagtggggtcccatcaaggttcagcggcagtggatctgggacagatttcactctcaccatcagcagcctgcagcctgaagattttgcaacttattactgtcagcaaacaaatagtttcccttacacttttggcggagggaccaaggttgagatcaaaggagggggcggatcaggcggaggtggatcgggagggggtggtagcgaggtgcagctgttggagtctgggggaggcttggtacagcctggggggtccctgagactctcctgtgcagcctctggattcacctttagcaattatgccatgagctgggtccgccaggctccagggaaggggctggagtgggtctcagctattagtggtagtggtggtagcacatactacgcagactccgtgaagggccggttcaccatctccagagacaattccaagaacacgctgtatctgcaaatgaacagcctgagagccgaggacacggcggtgtactactgcgccaagggccctcctacataccacacaaactactactacatggacgtatggggcaagggtacaactgtcaccgtctcctcacaccatcatcatcaccat

SEQ ID NO: 618 - DNA, 1251 bp, synthetic construct
  source 1..1251: mol_type = other DNA
cccgctgctctgctgcctgcccggggtaccaacatggcccagaagcgtcctgcctgcaccctgaagcctgagtgtgtccagcagctgctggtttgctcccaggaggccaagaagtcagcctactgcccctacagtcactttcctgtgggggctgccctgctcacccaggaggggagaatcttcaaagggtgcaacatagaaaatgcctgctacccgctgggcatctgtgctgaacggaccgctatccagaaggccgtctcagaagggtacaaggatttcagggcaattgctatcgccagtgacatgcaagatgattttatctctccatgtggggcctgcaggcaagtcatgagagagtttggcaccaactggcccgtgtacatgaccaagccggatggtacgtatattggtggaggcggttcgggtggagggggatctggtggcggaggtagcggtggcgggggatcaggtggcgggggatcaggtggcgggggatcagacatccagatgacccagtctccatcttccgtgtctgcatctgtaggagacagagtcaccatcacttgtcgggcgagtcagggtattagcagctggttagcctggtatcagcagaaaccagggaaagcccctaagctcctgatctatgctgcatccagtttgcaaagtggggtcccatcaaggttcagcggcagtggatctgggacagatttcactctcaccatcagcagcctgcagcctgaagattttgcaacttattactgtcagcaaacaaatagtttcccttacacttttggcggagggaccaaggttgagatcaaaggagggggcggatcaggcggaggtggatcgggagggggtggtagcgaggtgcagctgttggagtctgggggaggcttggtacagcctggggggtccctgagactctcctgtgcagcctctggattcacctttagcagctatgtcatgatctgggtccgccaggctccagggaaggggctggagtgggtctcaagcattagtggtgacagcgtaacaacatactacgcagactccgtgaagggccggttcaccatctccagagacaattccaagaacacgctgtatctgcaaatgaacagcctgagagccgaggacacggcggtgtactactgcgccaagggccctcctacataccacacaaactactactacatggacgtatggggcaagggtacaactgtcaccgtctcctcacaccatcatcatcaccat

SEQ ID NO: 619 - DNA, 1245 bp, synthetic construct
  source 1..1245: mol_type = other DNA
cccgctgctctgctgcctgcccggggtaccaacatggcccagaagcgtcctgcctgcaccctgaagcctgagtgtgtccagcagctgctggtttgctcccaggaggccaagaagtcagcctactgcccctacagtcactttcctgtgggggctgccctgctcacccaggaggggagaatcttcaaagggtgcaacatagaaaatgcctgctacccgctgggcatctgtgctgaacggaccgctatccagaaggccgtctcagaagggtacaaggatttcagggcaattgctatcgccagtgacatgcaagatgattttatctctccatgtggggcctgcaggcaagtcatgagagagtttggcaccaactggcccgtgtacatgaccaagccggatggtacgtatattggtggaggcggttcgggtggagggggatctggtggcggaggtagcggtggcgggggatcaggtggcgggggatcaggtggcgggggatcagacatccagatgacccagtctccatcctccctgtctgcatctgtaggagacagagtcaccatcacttgccgggcaagtcagagcattagcagctatttaaattggtatcagcagaaaccagggaaagcccctaagctcctgatctatgctgcatccagtttgcaaagtggggtcccatcaaggttcagtggcagtggatctgggacagatttcactctcaccatcagcagtctgcaacctgaagattttgcaacttactactgtcagcaaagctacatcgccccttacacttttggcggagggaccaaggttgagatcaaaggagggggcggatcaggcggaggtggatcgggagggggtggtagcgaggtgcagctggtggagtctgggggaggcttggtccagcctggagggtccctgagactctcctgtgcagcctctggattcaccttcagtgaccactacatggactgggtccgccaggctccagggaaggggctggagtgggttggccgtactagaaacaaagctagtagttacaccacagaatacgccgcgtctgtgaaaggcagattcaccatctcaagagatgattcaaagaactcactgtatctgcaaatgaacagcctgaaaaccgaggacacggcggtgtactactgcgccagagagcctaaatactggatcgacttcgacctatgggggagaggtaccttggtcaccgtctcctcacaccatcatcatcaccat

SEQ ID NO: 620 - DNA, 1218 bp, synthetic construct
  source 1..1218: mol_type = other DNA
cccgctgctctgctgcctgcccggggtaccaacatggcccagaagcgtcctgcctgcaccctgaagcctgagtgtgtccagcagctgctggtttgctcccaggaggccaagaagtcagcctactgcccctacagtcactttcctgtgggggctgccctgctcacccaggaggggagaatcttcaaagggtgcaacatagaaaatgcctgctacccgctgggcatctgtgctgaacggaccgctatccagaaggccgtctcagaagggtacaaggatttcagggcaattgctatcgccagtgacatgcaagatgattttatctctccatgtggggcctgcaggcaagtcatgagagagtttggcaccaactggcccgtgtacatgaccaagccggatggtacgtatattggtggaggcggttcgggtggagggggatctggtggcggaggtagcggtggcgggggatcaggtggcgggggatcaggtggcgggggatcagacatccagatgacccagtctccatcctccctgtctgcatctgtaggagacagagtcaccatcacttgccgggcaagtcagagcattagcagctatttaaattggtatcagcagaaaccagggaaagcccctaagctcctgatctatgctgcatccagtttgcaaagtggggtcccatcaaggttcagtggcagtggatctgggacagatttcactctcaccatcagcagtctgcaacctgaagattttgcaacttactactgtcagcaaagctacatcgccccttacacttttggcggagggaccaaggttgagatcaaaggagggggcggatcaggcggaggtggatcgggagggggtggtagcgaggtgcagctggtggagtctgggggaggcttggtacagccagggcggtccctgagactctcctgtacagcttctggattcaccttcagtgaccacgacatgaactgggtccgccaggctccagggaaggggctggagtgggttggccgtactagaaacgccgctggaagttacaccacagaatacgccgcgtctgtgaaaggcagattcaccatctcaagagatgattcaaagaactcactgtatctgcaaatgaacagcctgaaaaccgaggacacggcggtgtactactgcgccagagagcctaaatactggatcgacttcgacctatgggggcaccatcatcatcaccat

SEQ ID NO: 621 - DNA, 1245 bp, synthetic construct
  source 1..1245: mol_type = other DNA
cccgctgctctgctgcctgcccggggtaccaacatggcccagaagcgtcctgcctgcaccctgaagcctgagtgtgtccagcagctgctggtttgctcccaggaggccaagaagtcagcctactgcccctacagtcactttcctgtgggggctgccctgctcacccaggaggggagaatcttcaaagggtgcaacatagaaaatgcctgctacccgctgggcatctgtgctgaacggaccgctatccagaaggccgtctcagaagggtacaaggatttcagggcaattgctatcgccagtgacatgcaagatgattttatctctccatgtggggcctgcaggcaagtcatgagagagtttggcaccaactggcccgtgtacatgaccaagccggatggtacgtatattggtggaggcggttcgggtggagggggatctggtggcggaggtagcggtggcgggggatcaggtggcgggggatcaggtggcgggggatcagaggtgcagctggtggagtctgggggaggcttggtccagcctggagggtccctgagactctcctgtgcagcctctggattcaccttcgtagaccacgacatggactgggtccgccaggctccagggaaggggctggagtgggttggccgtactagaaacaaactaggaagttacaccacagaatacgccgcgtctgtgaaaggcagattcaccatctcaagagatgattcaaagaactcactgtatctgcaaatgaacagcctgaaaaccgaggacacggcggtgtactactgcgccagagagcctaaatactggatcgacttcgacctatgggggagaggtaccttggtcaccgtctcctcaggagggggcggatcaggcggaggtggatcgggagggggtggtagcgacatccagatgacccagtctccatcctccctgtctgcatctgtaggagacagagtcaccatcacttgccgggcaagtcagagcattagcagctatttaaattggtatcagcagaaaccagggaaagcccctaagctcctgatctatgctgcatccagtttgcaaagtggggtcccatcaaggttcagtggcagtggatgcggtacagatttcactctcaccatcagcagtctgcaacctgaagattttgcaacttactactgtcagcaaagctacatcgccccttacacttttggcggagggaccaaggttgagatcaaacaccatcatcatcaccat

SEQ ID NO: 622 - DNA, 1266 bp, synthetic construct
  source 1..1266: mol_type = other DNA
cccgctgctctgctgcctgcccggggtaccaacatggcccagaagcgtcctgcctgcaccctgaagcctgagtgtgtccagcagctgctggtttgctcccaggaggccaagaagtcagcctactgcccctacagtcactttcctgtgggggctgccctgctcacccaggaggggagaatcttcaaagggtgcaacatagaaaatgcctgctacccgctgggcatctgtgctgaacggaccgctatccagaaggccgtctcagaagggtacaaggatttcagggcaattgctatcgccagtgacatgcaagatgattttatctctccatgtggggcctgcaggcaagtcatgagagagtttggcaccaactggcccgtgtacatgaccaagccggatggtacgtatattggtggaggcggttcgggtggagggggatctggtggcggaggtagcggtggcgggggatcaggtggcgggggatcaggtggcgggggatcaggtggcgggggatcagacatccagatgacccagtctccatcttccgtgtctgcatctgtaggagacagagtcaccatcacttgtcgggcgagtcagggtattagcagctggttagcctggtatcagcagaaaccagggaaagcccctaagctcctgatctatgctgcatccagtttgcaaagtggggtcccatcaaggttcagcggcagtggatctgggacagatttcactctcaccatcagcagcctgcagcctgaagattttgcaacttattactgtcagcaaacaaatagtttcccttacacttttggcggagggaccaaggttgagatcaaaggagggggcggatcaggcggaggtggatcgggagggggtggtagcgaggtgcagctgttggagtctgggggaggcttggtacagcctggggggtccctgagactctcctgtgcagcctctggattcacctttagcaattatgccatgagctgggtccgccaggctccagggaaggggctggagtgggtctcagctattagtggtagtggtggtagcacatactacgcagactccgtgaagggccggttcaccatctccagagacaattccaagaacacgctgtatctgcaaatgaacagcctgagagccgaggacacggcggtgtactactgcgccaagggccctcctacataccacacaaactactactacatggacgtatggggcaagggtacaactgtcaccgtctcctcacaccatcatcatcaccat

SEQ ID NO: 623 - DNA, 1266 bp, synthetic construct
  source 1..1266: mol_type = other DNA
cccgctgctctgctgcctgcccggggtaccaacatggcccagaagcgtcctgcctgcaccctgaagcctgagtgtgtccagcagctgctggtttgctcccaggaggccaagaagtcagcctactgcccctacagtcactttcctgtgggggctgccctgctcacccaggaggggagaatcttcaaagggtgcaacatagaaaatgcctgctacccgctgggcatctgtgctgaacggaccgctatccagaaggccgtctcagaagggtacaaggatttcagggcaattgctatcgccagtgacatgcaagatgattttatctctccatgtggggcctgcaggcaagtcatgagagagtttggcaccaactggcccgtgtacatgaccaagccggatggtacgtatattggtggaggcggttcgggtggagggggatctggtggcggaggtagcggtggcgggggatcaggtggcgggggatcaggtggcgggggatcaggtggcgggggatcagacatccagatgacccagtctccatcttccgtgtctgcatctgtaggagacagagtcaccatcacttgtcgggcgagtcagggtattagcagctggttagcctggtatcagcagaaaccagggaaagcccctaagctcctgatctatgctgcatccagtttgcaaagtggggtcccatcaaggttcagcggcagtggatctgggacagatttcactctcaccatcagcagcctgcagcctgaagattttgcaacttattactgtcagcaaacaaatagtttcccttacacttttggcggagggaccaaggttgagatcaaaggagggggcggatcaggcggaggtggatcgggagggggtggtagcgaggtgcagctgttggagtctgggggaggcttggtacagcctggggggtccctgagactctcctgtgcagcctctggattcacctttagcagctatgtcatgatctgggtccgccaggctccagggaaggggctggagtgggtctcaagcattagtggtgacagcgtaacaacatactacgcagactccgtgaagggccggttcaccatctccagagacaattccaagaacacgctgtatctgcaaatgaacagcctgagagccgaggacacggcggtgtactactgcgccaagggccctcctacataccacacaaactactactacatggacgtatggggcaagggtacaactgtcaccgtctcctcacaccatcatcatcaccat

SEQ ID NO: 624 - DNA, 1260 bp, synthetic construct
  source 1..1260: mol_type = other DNA
cccgctgctctgctgcctgcccggggtaccaacatggcccagaagcgtcctgcctgcaccctgaagcctgagtgtgtccagcagctgctggtttgctcccaggaggccaagaagtcagcctactgcccctacagtcactttcctgtgggggctgccctgctcacccaggaggggagaatcttcaaagggtgcaacatagaaaatgcctgctacccgctgggcatctgtgctgaacggaccgctatccagaaggccgtctcagaagggtacaaggatttcagggcaattgctatcgccagtgacatgcaagatgattttatctctccatgtggggcctgcaggcaagtcatgagagagtttggcaccaactggcccgtgtacatgaccaagccggatggtacgtatattggtggaggcggttcgggtggagggggatctggtggcggaggtagcggtggcgggggatcaggtggcgggggatcaggtggcgggggatcaggtggcgggggatcagacatccagatgacccagtctccatcctccctgtctgcatctgtaggagacagagtcaccatcacttgccgggcaagtcagagcattagcagctatttaaattggtatcagcagaaaccagggaaagcccctaagctcctgatctatgctgcatccagtttgcaaagtggggtcccatcaaggttcagtggcagtggatctgggacagatttcactctcaccatcagcagtctgcaacctgaagattttgcaacttactactgtcagcaaagctacatcgccccttacacttttggcggagggaccaaggttgagatcaaaggagggggcggatcaggcggaggtggatcgggagggggtggtagcgaggtgcagctggtggagtctgggggaggcttggtccagcctggagggtccctgagactctcctgtgcagcctctggattcaccttcagtgaccactacatggactgggtccgccaggctccagggaaggggctggagtgggttggccgtactagaaacaaagctagtagttacaccacagaatacgccgcgtctgtgaaaggcagattcaccatctcaagagatgattcaaagaactcactgtatctgcaaatgaacagcctgaaaaccgaggacacggcggtgtactactgcgccagagagcctaaatactggatcgacttcgacctatgggggagaggtaccttggtcaccgtctcctcacaccatcatcatcaccat

SEQ ID NO: 625 - DNA, 1233 bp, synthetic construct
  source 1..1233: mol_type = other DNA
cccgctgctctgctgcctgcccggggtaccaacatggcccagaagcgtcctgcctgcaccctgaagcctgagtgtgtccagcagctgctggtttgctcccaggaggccaagaagtcagcctactgcccctacagtcactttcctgtgggggctgccctgctcacccaggaggggagaatcttcaaagggtgcaacatagaaaatgcctgctacccgctgggcatctgtgctgaacggaccgctatccagaaggccgtctcagaagggtacaaggatttcagggcaattgctatcgccagtgacatgcaagatgattttatctctccatgtggggcctgcaggcaagtcatgagagagtttggcaccaactggcccgtgtacatgaccaagccggatggtacgtatattggtggaggcggttcgggtggagggggatctggtggcggaggtagcggtggcgggggatcaggtggcgggggatcaggtggcgggggatcaggtggcgggggatcagacatccagatgacccagtctccatcctccctgtctgcatctgtaggagacagagtcaccatcacttgccgggcaagtcagagcattagcagctatttaaattggtatcagcagaaaccagggaaagcccctaagctcctgatctatgctgcatccagtttgcaaagtggggtcccatcaaggttcagtggcagtggatctgggacagatttcactctcaccatcagcagtctgcaacctgaagattttgcaacttactactgtcagcaaagctacatcgccccttacacttttggcggagggaccaaggttgagatcaaaggagggggcggatcaggcggaggtggatcgggagggggtggtagcgaggtgcagctggtggagtctgggggaggcttggtacagccagggcggtccctgagactctcctgtacagcttctggattcaccttcagtgaccacgacatgaactgggtccgccaggctccagggaaggggctggagtgggttggccgtactagaaacgccgctggaagttacaccacagaatacgccgcgtctgtgaaaggcagattcaccatctcaagagatgattcaaagaactcactgtatctgcaaatgaacagcctgaaaaccgaggacacggcggtgtactactgcgccagagagcctaaatactggatcgacttcgacctatgggggcaccatcatcatcaccat

SEQ ID NO: 626 - DNA, 1260 bp, synthetic construct
  source 1..1260: mol_type = other DNA
cccgctgctctgctgcctgcccggggtaccaacatggcccagaagcgtcctgcctgcaccctgaagcctgagtgtgtccagcagctgctggtttgctcccaggaggccaagaagtcagcctactgcccctacagtcactttcctgtgggggctgccctgctcacccaggaggggagaatcttcaaagggtgcaacatagaaaatgcctgctacccgctgggcatctgtgctgaacggaccgctatccagaaggccgtctcagaagggtacaaggatttcagggcaattgctatcgccagtgacatgcaagatgattttatctctccatgtggggcctgcaggcaagtcatgagagagtttggcaccaactggcccgtgtacatgaccaagccggatggtacgtatattggtggaggcggttcgggtggagggggatctggtggcggaggtagcggtggcgggggatcaggtggcgggggatcaggtggcgggggatcaggtggcgggggatcagaggtgcagctggtggagtctgggggaggcttggtccagcctggagggtccctgagactctcctgtgcagcctctggattcaccttcgtagaccacgacatggactgggtccgccaggctccagggaaggggctggagtgggttggccgtactagaaacaaactaggaagttacaccacagaatacgccgcgtctgtgaaaggcagattcaccatctcaagagatgattcaaagaactcactgtatctgcaaatgaacagcctgaaaaccgaggacacggcggtgtactactgcgccagagagcctaaatactggatcgacttcgacctatgggggagaggtaccttggtcaccgtctcctcaggagggggcggatcaggcggaggtggatcgggagggggtggtagcgacatccagatgacccagtctccatcctccctgtctgcatctgtaggagacagagtcaccatcacttgccgggcaagtcagagcattagcagctatttaaattggtatcagcagaaaccagggaaagcccctaagctcctgatctatgctgcatccagtttgcaaagtggggtcccatcaaggttcagtggcagtggatgcggtacagatttcactctcaccatcagcagtctgcaacctgaagattttgcaacttactactgtcagcaaagctacatcgccccttacacttttggcggagggaccaaggttgagatcaaacaccatcatcatcaccat

SEQ ID NO: 627 - DNA, 1281 bp, synthetic construct
  source 1..1281: mol_type = other DNA
cccgctgctctgctgcctgcccggggtaccaacatggcccagaagcgtcctgcctgcaccctgaagcctgagtgtgtccagcagctgctggtttgctcccaggaggccaagaagtcagcctactgcccctacagtcactttcctgtgggggctgccctgctcacccaggaggggagaatcttcaaagggtgcaacatagaaaatgcctgctacccgctgggcatctgtgctgaacggaccgctatccagaaggccgtctcagaagggtacaaggatttcagggcaattgctatcgccagtgacatgcaagatgattttatctctccatgtggggcctgcaggcaagtcatgagagagtttggcaccaactggcccgtgtacatgaccaagccggatggtacgtatattggtggaggcggttcgggtggagggggatctggtggcggaggtagcggtggcgggggatcaggtggcgggggatcaggtggcgggggatcaggtggcgggggatcaggtggcgggggatcagacatccagatgacccagtctccatcttccgtgtctgcatctgtaggagacagagtcaccatcacttgtcgggcgagtcagggtattagcagctggttagcctggtatcagcagaaaccagggaaagcccctaagctcctgatctatgctgcatccagtttgcaaagtggggtcccatcaaggttcagcggcagtggatctgggacagatttcactctcaccatcagcagcctgcagcctgaagattttgcaacttattactgtcagcaaacaaatagtttcccttacacttttggcggagggaccaaggttgagatcaaaggagggggcggatcaggcggaggtggatcgggagggggtggtagcgaggtgcagctgttggagtctgggggaggcttggtacagcctggggggtccctgagactctcctgtgcagcctctggattcacctttagcaattatgccatgagctgggtccgccaggctccagggaaggggctggagtgggtctcagctattagtggtagtggtggtagcacatactacgcagactccgtgaagggccggttcaccatctccagagacaattccaagaacacgctgtatctgcaaatgaacagcctgagagccgaggacacggcggtgtactactgcgccaagggccctcctacataccacacaaactactactacatggacgtatggggcaagggtacaactgtcaccgtctcctcacaccatcatcatcaccat

SEQ ID NO: 628 - DNA, 1281 bp, synthetic construct
  source 1..1281: mol_type = other DNA
cccgctgctctgctgcctgcccggggtaccaacatggcccagaagcgtcctgcctgcaccctgaagcctgagtgtgtccagcagctgctggtttgctcccaggaggccaagaagtcagcctactgcccctacagtcactttcctgtgggggctgccctgctcacccaggaggggagaatcttcaaagggtgcaacatagaaaatgcctgctacccgctgggcatctgtgctgaacggaccgctatccagaaggccgtctcagaagggtacaaggatttcagggcaattgctatcgccagtgacatgcaagatgattttatctctccatgtggggcctgcaggcaagtcatgagagagtttggcaccaactggcccgtgtacatgaccaagccggatggtacgtatattggtggaggcggttcgggtggagggggatctggtggcggaggtagcggtggcgggggatcaggtggcgggggatcaggtggcgggggatcaggtggcgggggatcaggtggcgggggatcagacatccagatgacccagtctccatcttccgtgtctgcatctgtaggagacagagtcaccatcacttgtcgggcgagtcagggtattagcagctggttagcctggtatcagcagaaaccagggaaagcccctaagctcctgatctatgctgcatccagtttgcaaagtggggtcccatcaaggttcagcggcagtggatctgggacagatttcactctcaccatcagcagcctgcagcctgaagattttgcaacttattactgtcagcaaacaaatagtttcccttacacttttggcggagggaccaaggttgagatcaaaggagggggcggatcaggcggaggtggatcgggagggggtggtagcgaggtgcagctgttggagtctgggggaggcttggtacagcctggggggtccctgagactctcctgtgcagcctctggattcacctttagcagctatgtcatgatctgggtccgccaggctccagggaaggggctggagtgggtctcaagcattagtggtgacagcgtaacaacatactacgcagactccgtgaagggccggttcaccatctccagagacaattccaagaacacgctgtatctgcaaatgaacagcctgagagccgaggacacggcggtgtactactgcgccaagggccctcctacataccacacaaactactactacatggacgtatggggcaagggtacaactgtcaccgtctcctcacaccatcatcatcaccat

SEQ ID NO: 629 - DNA, 1275 bp, synthetic construct
  source 1..1275: mol_type = other DNA
cccgctgctctgctgcctgcccggggtaccaacatggcccagaagcgtcctgcctgcaccctgaagcctgagtgtgtccagcagctgctggtttgctcccaggaggccaagaagtcagcctactgcccctacagtcactttcctgtgggggctgccctgctcacccaggaggggagaatcttcaaagggtgcaacatagaaaatgcctgctacccgctgggcatctgtgctgaacggaccgctatccagaaggccgtctcagaagggtacaaggatttcagggcaattgctatcgccagtgacatgcaagatgattttatctctccatgtggggcctgcaggcaagtcatgagagagtttggcaccaactggcccgtgtacatgaccaagccggatggtacgtatattggtggaggcggttcgggtggagggggatctggtggcggaggtagcggtggcgggggatcaggtggcgggggatcaggtggcgggggatcaggtggcgggggatcaggtggcgggggatcagacatccagatgacccagtctccatcctccctgtctgcatctgtaggagacagagtcaccatcacttgccgggcaagtcagagcattagcagctatttaaattggtatcagcagaaaccagggaaagcccctaagctcctgatctatgctgcatccagtttgcaaagtggggtcccatcaaggttcagtggcagtggatctgggacagatttcactctcaccatcagcagtctgcaacctgaagattttgcaacttactactgtcagcaaagctacatcgccccttacacttttggcggagggaccaaggttgagatcaaaggagggggcggatcaggcggaggtggatcgggagggggtggtagcgaggtgcagctggtggagtctgggggaggcttggtccagcctggagggtccctgagactctcctgtgcagcctctggattcaccttcagtgaccactacatggactgggtccgccaggctccagggaaggggctggagtgggttggccgtactagaaacaaagctagtagttacaccacagaatacgccgcgtctgtgaaaggcagattcaccatctcaagagatgattcaaagaactcactgtatctgcaaatgaacagcctgaaaaccgaggacacggcggtgtactactgcgccagagagcctaaatactggatcgacttcgacctatgggggagaggtaccttggtcaccgtctcctcacaccatcatcatcaccat

SEQ ID NO: 630 - DNA, 1248 bp, synthetic construct
  source 1..1248: mol_type = other DNA
cccgctgctctgctgcctgcccggggtaccaacatggcccagaagcgtcctgcctgcaccctgaagcctgagtgtgtccagcagctgctggtttgctcccaggaggccaagaagtcagcctactgcccctacagtcactttcctgtgggggctgccctgctcacccaggaggggagaatcttcaaagggtgcaacatagaaaatgcctgctacccgctgggcatctgtgctgaacggaccgctatccagaaggccgtctcagaagggtacaaggatttcagggcaattgctatcgccagtgacatgcaagatgattttatctctccatgtggggcctgcaggcaagtcatgagagagtttggcaccaactggcccgtgtacatgaccaagccggatggtacgtatattggtggaggcggttcgggtggagggggatctggtggcggaggtagcggtggcgggggatcaggtggcgggggatcaggtggcgggggatcaggtggcgggggatcaggtggcgggggatcagacatccagatgacccagtctccatcctccctgtctgcatctgtaggagacagagtcaccatcacttgccgggcaagtcagagcattagcagctatttaaattggtatcagcagaaaccagggaaagcccctaagctcctgatctatgctgcatccagtttgcaaagtggggtcccatcaaggttcagtggcagtggatctgggacagatttcactctcaccatcagcagtctgcaacctgaagattttgcaacttactactgtcagcaaagctacatcgccccttacacttttggcggagggaccaaggttgagatcaaaggagggggcggatcaggcggaggtggatcgggagggggtggtagcgaggtgcagctggtggagtctgggggaggcttggtacagccagggcggtccctgagactctcctgtacagcttctggattcaccttcagtgaccacgacatgaactgggtccgccaggctccagggaaggggctggagtgggttggccgtactagaaacgccgctggaagttacaccacagaatacgccgcgtctgtgaaaggcagattcaccatctcaagagatgattcaaagaactcactgtatctgcaaatgaacagcctgaaaaccgaggacacggcggtgtactactgcgccagagagcctaaatactggatcgacttcgacctatgggggcaccatcatcatcaccat

SEQ ID NO: 631 - DNA, 1275 bp, synthetic construct
  source 1..1275: mol_type = other DNA
cccgctgctctgctgcctgcccggggtaccaacatggcccagaagcgtcctgcctgcaccctgaagcctgagtgtgtccagcagctgctggtttgctcccaggaggccaagaagtcagcctactgcccctacagtcactttcctgtgggggctgccctgctcacccaggaggggagaatcttcaaagggtgcaacatagaaaatgcctgctacccgctgggcatctgtgctgaacggaccgctatccagaaggccgtctcagaagggtacaaggatttcagggcaattgctatcgccagtgacatgcaagatgattttatctctccatgtggggcctgcaggcaagtcatgagagagtttggcaccaactggcccgtgtacatgaccaagccggatggtacgtatattggtggaggcggttcgggtggagggggatctggtggcggaggtagcggtggcgggggatcaggtggcgggggatcaggtggcgggggatcaggtggcgggggatcaggtggcgggggatcagaggtgcagctggtggagtctgggggaggcttggtccagcctggagggtccctgagactctcctgtgcagcctctggattcaccttcgtagaccacgacatggactgggtccgccaggctccagggaaggggctggagtgggttggccgtactagaaacaaactaggaagttacaccacagaatacgccgcgtctgtgaaaggcagattcaccatctcaagagatgattcaaagaactcactgtatctgcaaatgaacagcctgaaaaccgaggacacggcggtgtactactgcgccagagagcctaaatactggatcgacttcgacctatgggggagaggtaccttggtcaccgtctcctcaggagggggcggatcaggcggaggtggatcgggagggggtggtagcgacatccagatgacccagtctccatcctccctgtctgcatctgtaggagacagagtcaccatcacttgccgggcaagtcagagcattagcagctatttaaattggtatcagcagaaaccagggaaagcccctaagctcctgatctatgctgcatccagtttgcaaagtggggtcccatcaaggttcagtggcagtggatgcggtacagatttcactctcaccatcagcagtctgcaacctgaagattttgcaacttactactgtcagcaaagctacatcgccccttacacttttggcggagggaccaaggttgagatcaaacaccatcatcatcaccat

SEQ ID NO: 632 - DNA, 1296 bp, synthetic construct
  source 1..1296: mol_type = other DNA
cccgctgctctgctgcctgcccggggtaccaacatggcccagaagcgtcctgcctgcaccctgaagcctgagtgtgtccagcagctgctggtttgctcccaggaggccaagaagtcagcctactgcccctacagtcactttcctgtgggggctgccctgctcacccaggaggggagaatcttcaaagggtgcaacatagaaaatgcctgctacccgctgggcatctgtgctgaacggaccgctatccagaaggccgtctcagaagggtacaaggatttcagggcaattgctatcgccagtgacatgcaagatgattttatctctccatgtggggcctgcaggcaagtcatgagagagtttggcaccaactggcccgtgtacatgaccaagccggatggtacgtatattggtggaggcggttcgggtggagggggatctggtggcggaggtagcggtggcgggggatcaggtggcgggggatcaggtggcgggggatcaggtggcgggggatcaggtggcgggggatcaggtggcgggggatcagacatccagatgacccagtctccatcttccgtgtctgcatctgtaggagacagagtcaccatcacttgtcgggcgagtcagggtattagcagctggttagcctggtatcagcagaaaccagggaaagcccctaagctcctgatctatgctgcatccagtttgcaaagtggggtcccatcaaggttcagcggcagtggatctgggacagatttcactctcaccatcagcagcctgcagcctgaagattttgcaacttattactgtcagcaaacaaatagtttcccttacacttttggcggagggaccaaggttgagatcaaaggagggggcggatcaggcggaggtggatcgggagggggtggtagcgaggtgcagctgttggagtctgggggaggcttggtacagcctggggggtccctgagactctcctgtgcagcctctggattcacctttagcaattatgccatgagctgggtccgccaggctccagggaaggggctggagtgggtctcagctattagtggtagtggtggtagcacatactacgcagactccgtgaagggccggttcaccatctccagagacaattccaagaacacgctgtatctgcaaatgaacagcctgagagccgaggacacggcggtgtactactgcgccaagggccctcctacataccacacaaactactactacatggacgtatggggcaagggtacaactgtcaccgtctcctcacaccatcatcatcaccat

SEQ ID NO: 633 - DNA, 1296 bp, synthetic construct
  source 1..1296: mol_type = other DNA
cccgctgctctgctgcctgcccggggtaccaacatggcccagaagcgtcctgcctgcaccctgaagcctgagtgtgtccagcagctgctggtttgctcccaggaggccaagaagtcagcctactgcccctacagtcactttcctgtgggggctgccctgctcacccaggaggggagaatcttcaaagggtgcaacatagaaaatgcctgctacccgctgggcatctgtgctgaacggaccgctatccagaaggccgtctcagaagggtacaaggatttcagggcaattgctatcgccagtgacatgcaagatgattttatctctccatgtggggcctgcaggcaagtcatgagagagtttggcaccaactggcccgtgtacatgaccaagccggatggtacgtatattggtggaggcggttcgggtggagggggatctggtggcggaggtagcggtggcgggggatcaggtggcgggggatcaggtggcgggggatcaggtggcgggggatcaggtggcgggggatcaggtggcgggggatcagacatccagatgacccagtctccatcttccgtgtctgcatctgtaggagacagagtcaccatcacttgtcgggcgagtcagggtattagcagctggttagcctggtatcagcagaaaccagggaaagcccctaagctcctgatctatgctgcatccagtttgcaaagtggggtcccatcaaggttcagcggcagtggatctgggacagatttcactctcaccatcagcagcctgcagcctgaagattttgcaacttattactgtcagcaaacaaatagtttcccttacacttttggcggagggaccaaggttgagatcaaaggagggggcggatcaggcggaggtggatcgggagggggtggtagcgaggtgcagctgttggagtctgggggaggcttggtacagcctggggggtccctgagactctcctgtgcagcctctggattcacctttagcagctatgtcatgatctgggtccgccaggctccagggaaggggctggagtgggtctcaagcattagtggtgacagcgtaacaacatactacgcagactccgtgaagggccggttcaccatctccagagacaattccaagaacacgctgtatctgcaaatgaacagcctgagagccgaggacacggcggtgtactactgcgccaagggccctcctacataccacacaaactactactacatggacgtatggggcaagggtacaactgtcaccgtctcctcacaccatcatcatcaccat

SEQ ID NO: 634 - DNA, 1290 bp, synthetic construct
  source 1..1290: mol_type = other DNA
cccgctgctctgctgcctgcccggggtaccaacatggcccagaagcgtcctgcctgcaccctgaagcctgagtgtgtccagcagctgctggtttgctcccaggaggccaagaagtcagcctactgcccctacagtcactttcctgtgggggctgccctgctcacccaggaggggagaatcttcaaagggtgcaacatagaaaatgcctgctacccgctgggcatctgtgctgaacggaccgctatccagaaggccgtctcagaagggtacaaggatttcagggcaattgctatcgccagtgacatgcaagatgattttatctctccatgtggggcctgcaggcaagtcatgagagagtttggcaccaactggcccgtgtacatgaccaagccggatggtacgtatattggtggaggcggttcgggtggagggggatctggtggcggaggtagcggtggcgggggatcaggtggcgggggatcaggtggcgggggatcaggtggcgggggatcaggtggcgggggatcaggtggcgggggatcagacatccagatgacccagtctccatcctccctgtctgcatctgtaggagacagagtcaccatcacttgccgggcaagtcagagcattagcagctatttaaattggtatcagcagaaaccagggaaagcccctaagctcctgatctatgctgcatccagtttgcaaagtggggtcccatcaaggttcagtggcagtggatctgggacagatttcactctcaccatcagcagtctgcaacctgaagattttgcaacttactactgtcagcaaagctacatcgccccttacacttttggcggagggaccaaggttgagatcaaaggagggggcggatcaggcggaggtggatcgggagggggtggtagcgaggtgcagctggtggagtctgggggaggcttggtccagcctggagggtccctgagactctcctgtgcagcctctggattcaccttcagtgaccactacatggactgggtccgccaggctccagggaaggggctggagtgggttggccgtactagaaacaaagctagtagttacaccacagaatacgccgcgtctgtgaaaggcagattcaccatctcaagagatgattcaaagaactcactgtatctgcaaatgaacagcctgaaaaccgaggacacggcggtgtactactgcgccagagagcctaaatactggatcgacttcgacctatgggggagaggtaccttggtcaccgtctcctcacaccatcatcatcaccat

SEQ ID NO: 635 - DNA, 1263 bp, synthetic construct
  source 1..1263: mol_type = other DNA
cccgctgctctgctgcctgcccggggtaccaacatggcccagaagcgtcctgcctgcaccctgaagcctgagtgtgtccagcagctgctggtttgctcccaggaggccaagaagtcagcctactgcccctacagtcactttcctgtgggggctgccctgctcacccaggaggggagaatcttcaaagggtgcaacatagaaaatgcctgctacccgctgggcatctgtgctgaacggaccgctatccagaaggccgtctcagaagggtacaaggatttcagggcaattgctatcgccagtgacatgcaagatgattttatctctccatgtggggcctgcaggcaagtcatgagagagtttggcaccaactggcccgtgtacatgaccaagccggatggtacgtatattggtggaggcggttcgggtggagggggatctggtggcggaggtagcggtggcgggggatcaggtggcgggggatcaggtggcgggggatcaggtggcgggggatcaggtggcgggggatcaggtggcgggggatcagacatccagatgacccagtctccatcctccctgtctgcatctgtaggagacagagtcaccatcacttgccgggcaagtcagagcattagcagctatttaaattggtatcagcagaaaccagggaaagcccctaagctcctgatctatgctgcatccagtttgcaaagtggggtcccatcaaggttcagtggcagtggatctgggacagatttcactctcaccatcagcagtctgcaacctgaagattttgcaacttactactgtcagcaaagctacatcgccccttacacttttggcggagggaccaaggttgagatcaaaggagggggcggatcaggcggaggtggatcgggagggggtggtagcgaggtgcagctggtggagtctgggggaggcttggtacagccagggcggtccctgagactctcctgtacagcttctggattcaccttcagtgaccacgacatgaactgggtccgccaggctccagggaaggggctggagtgggttggccgtactagaaacgccgctggaagttacaccacagaatacgccgcgtctgtgaaaggcagattcaccatctcaagagatgattcaaagaactcactgtatctgcaaatgaacagcctgaaaaccgaggacacggcggtgtactactgcgccagagagcctaaatactggatcgacttcgacctatgggggcaccatcatcatcaccat

SEQ ID NO: 636 - DNA, 1290 bp, synthetic construct
  source 1..1290: mol_type = other DNA
cccgctgctctgctgcctgcccggggtaccaacatggcccagaagcgtcctgcctgcaccctgaagcctgagtgtgtccagcagctgctggtttgctcccaggaggccaagaagtcagcctactgcccctacagtcactttcctgtgggggctgccctgctcacccaggaggggagaatcttcaaagggtgcaacatagaaaatgcctgctacccgctgggcatctgtgctgaacggaccgctatccagaaggccgtctcagaagggtacaaggatttcagggcaattgctatcgccagtgacatgcaagatgattttatctctccatgtggggcctgcaggcaagtcatgagagagtttggcaccaactggcccgtgtacatgaccaagccggatggtacgtatattggtggaggcggttcgggtggagggggatctggtggcggaggtagcggtggcgggggatcaggtggcgggggatcaggtggcgggggatcaggtggcgggggatcaggtggcgggggatcaggtggcgggggatcagaggtgcagctggtggagtctgggggaggcttggtccagcctggagggtccctgagactctcctgtgcagcctctggattcaccttcgtagaccacgacatggactgggtccgccaggctccagggaaggggctggagtgggttggccgtactagaaacaaactaggaagttacaccacagaatacgccgcgtctgtgaaaggcagattcaccatctcaagagatgattcaaagaactcactgtatctgcaaatgaacagcctgaaaaccgaggacacggcggtgtactactgcgccagagagcctaaatactggatcgacttcgacctatgggggagaggtaccttggtcaccgtctcctcaggagggggcggatcaggcggaggtggatcgggagggggtggtagcgacatccagatgacccagtctccatcctccctgtctgcatctgtaggagacagagtcaccatcacttgccgggcaagtcagagcattagcagctatttaaattggtatcagcagaaaccagggaaagcccctaagctcctgatctatgctgcatccagtttgcaaagtggggtcccatcaaggttcagtggcagtggatgcggtacagatttcactctcaccatcagcagtctgcaacctgaagattttgcaacttactactgtcagcaaagctacatcgccccttacacttttggcggagggaccaaggttgagatcaaacaccatcatcatcaccat

SEQ ID NO: 637 - DNA, 1311 bp, synthetic construct
  source 1..1311: mol_type = other DNA
cccgctgctctgctgcctgcccggggtaccaacatggcccagaagcgtcctgcctgcaccctgaagcctgagtgtgtccagcagctgctggtttgctcccaggaggccaagaagtcagcctactgcccctacagtcactttcctgtgggggctgccctgctcacccaggaggggagaatcttcaaagggtgcaacatagaaaatgcctgctacccgctgggcatctgtgctgaacggaccgctatccagaaggccgtctcagaagggtacaaggatttcagggcaattgctatcgccagtgacatgcaagatgattttatctctccatgtggggcctgcaggcaagtcatgagagagtttggcaccaactggcccgtgtacatgaccaagccggatggtacgtatattggtggaggcggttcgggtggagggggatctggtggcggaggtagcggtggcgggggatcaggtggcgggggatcaggtggcgggggatcaggtggcgggggatcaggtggcgggggatcaggtggcgggggatcaggtggcgggggatcagacatccagatgacccagtctccatcttccgtgtctgcatctgtaggagacagagtcaccatcacttgtcgggcgagtcagggtattagcagctggttagcctggtatcagcagaaaccagggaaagcccctaagctcctgatctatgctgcatccagtttgcaaagtggggtcccatcaaggttcagcggcagtggatctgggacagatttcactctcaccatcagcagcctgcagcctgaagattttgcaacttattactgtcagcaaacaaatagtttcccttacacttttggcggagggaccaaggttgagatcaaaggagggggcggatcaggcggaggtggatcgggagggggtggtagcgaggtgcagctgttggagtctgggggaggcttggtacagcctggggggtccctgagactctcctgtgcagcctctggattcacctttagcaattatgccatgagctgggtccgccaggctccagggaaggggctggagtgggtctcagctattagtggtagtggtggtagcacatactacgcagactccgtgaagggccggttcaccatctccagagacaattccaagaacacgctgtatctgcaaatgaacagcctgagagccgaggacacggcggtgtactactgcgccaagggccctcctacataccacacaaactactactacatggacgtatggggcaagggtacaactgtcaccgtctcctcacaccatcatcatcaccat

SEQ ID NO: 638 - DNA, 1311 bp, synthetic construct
  source 1..1311: mol_type = other DNA
cccgctgctctgctgcctgcccggggtaccaacatggcccagaagcgtcctgcctgcaccctgaagcctgagtgtgtccagcagctgctggtttgctcccaggaggccaagaagtcagcctactgcccctacagtcactttcctgtgggggctgccctgctcacccaggaggggagaatcttcaaagggtgcaacatagaaaatgcctgctacccgctgggcatctgtgctgaacggaccgctatccagaaggccgtctcagaagggtacaaggatttcagggcaattgctatcgccagtgacatgcaagatgattttatctctccatgtggggcctgcaggcaagtcatgagagagtttggcaccaactggcccgtgtacatgaccaagccggatggtacgtatattggtggaggcggttcgggtggagggggatctggtggcggaggtagcggtggcgggggatcaggtggcgggggatcaggtggcgggggatcaggtggcgggggatcaggtggcgggggatcaggtggcgggggatcaggtggcgggggatcagacatccagatgacccagtctccatcttccgtgtctgcatctgtaggagacagagtcaccatcacttgtcgggcgagtcagggtattagcagctggttagcctggtatcagcagaaaccagggaaagcccctaagctcctgatctatgctgcatccagtttgcaaagtggggtcccatcaaggttcagcggcagtggatctgggacagatttcactctcaccatcagcagcctgcagcctgaagattttgcaacttattactgtcagcaaacaaatagtttcccttacacttttggcggagggaccaaggttgagatcaaaggagggggcggatcaggcggaggtggatcgggagggggtggtagcgaggtgcagctgttggagtctgggggaggcttggtacagcctggggggtccctgagactctcctgtgcagcctctggattcacctttagcagctatgtcatgatctgggtccgccaggctccagggaaggggctggagtgggtctcaagcattagtggtgacagcgtaacaacatactacgcagactccgtgaagggccggttcaccatctccagagacaattccaagaacacgctgtatctgcaaatgaacagcctgagagccgaggacacggcggtgtactactgcgccaagggccctcctacataccacacaaactactactacatggacgtatggggcaagggtacaactgtcaccgtctcctcacaccatcatcatcaccat

SEQ ID NO: 639 - DNA, 1305 bp, synthetic construct
  source 1..1305: mol_type = other DNA
cccgctgctctgctgcctgcccggggtaccaacatggcccagaagcgtcctgcctgcaccctgaagcctgagtgtgtccagcagctgctggtttgctcccaggaggccaagaagtcagcctactgcccctacagtcactttcctgtgggggctgccctgctcacccaggaggggagaatcttcaaagggtgcaacatagaaaatgcctgctacccgctgggcatctgtgctgaacggaccgctatccagaaggccgtctcagaagggtacaaggatttcagggcaattgctatcgccagtgacatgcaagatgattttatctctccatgtggggcctgcaggcaagtcatgagagagtttggcaccaactggcccgtgtacatgaccaagccggatggtacgtatattggtggaggcggttcgggtggagggggatctggtggcggaggtagcggtggcgggggatcaggtggcgggggatcaggtggcgggggatcaggtggcgggggatcaggtggcgggggatcaggtggcgggggatcaggtggcgggggatcagacatccagatgacccagtctccatcctccctgtctgcatctgtaggagacagagtcaccatcacttgccgggcaagtcagagcattagcagctatttaaattggtatcagcagaaaccagggaaagcccctaagctcctgatctatgctgcatccagtttgcaaagtggggtcccatcaaggttcagtggcagtggatctgggacagatttcactctcaccatcagcagtctgcaacctgaagattttgcaacttactactgtcagcaaagctacatcgccccttacacttttggcggagggaccaaggttgagatcaaaggagggggcggatcaggcggaggtggatcgggagggggtggtagcgaggtgcagctggtggagtctgggggaggcttggtccagcctggagggtccctgagactctcctgtgcagcctctggattcaccttcagtgaccactacatggactgggtccgccaggctccagggaaggggctggagtgggttggccgtactagaaacaaagctagtagttacaccacagaatacgccgcgtctgtgaaaggcagattcaccatctcaagagatgattcaaagaactcactgtatctgcaaatgaacagcctgaaaaccgaggacacggcggtgtactactgcgccagagagcctaaatactggatcgacttcgacctatgggggagaggtaccttggtcaccgtctcctcacaccatcatcatcaccat

SEQ ID NO: 640 - DNA, 1278 bp, synthetic construct
  source 1..1278: mol_type = other DNA
cccgctgctctgctgcctgcccggggtaccaacatggcccagaagcgtcctgcctgcaccctgaagcctgagtgtgtccagcagctgctggtttgctcccaggaggccaagaagtcagcctactgcccctacagtcactttcctgtgggggctgccctgctcacccaggaggggagaatcttcaaagggtgcaacatagaaaatgcctgctacccgctgggcatctgtgctgaacggaccgctatccagaaggccgtctcagaagggtacaaggatttcagggcaattgctatcgccagtgacatgcaagatgattttatctctccatgtggggcctgcaggcaagtcatgagagagtttggcaccaactggcccgtgtacatgaccaagccggatggtacgtatattggtggaggcggttcgggtggagggggatctggtggcggaggtagcggtggcgggggatcaggtggcgggggatcaggtggcgggggatcaggtggcgggggatcaggtggcgggggatcaggtggcgggggatcaggtggcgggggatcagacatccagatgacccagtctccatcctccctgtctgcatctgtaggagacagagtcaccatcacttgccgggcaagtcagagcattagcagctatttaaattggtatcagcagaaaccagggaaagcccctaagctcctgatctatgctgcatccagtttgcaaagtggggtcccatcaaggttcagtggcagtggatctgggacagatttcactctcaccatcagcagtctgcaacctgaagattttgcaacttactactgtcagcaaagctacatcgccccttacacttttggcggagggaccaaggttgagatcaaaggagggggcggatcaggcggaggtggatcgggagggggtggtagcgaggtgcagctggtggagtctgggggaggcttggtacagccagggcggtccctgagactctcctgtacagcttctggattcaccttcagtgaccacgacatgaactgggtccgccaggctccagggaaggggctggagtgggttggccgtactagaaacgccgctggaagttacaccacagaatacgccgcgtctgtgaaaggcagattcaccatctcaagagatgattcaaagaactcactgtatctgcaaatgaacagcctgaaaaccgaggacacggcggtgtactactgcgccagagagcctaaatactggatcgacttcgacctatgggggcaccatcatcatcaccat

SEQ ID NO: 641 - DNA, 1305 bp, synthetic construct
  source 1..1305: mol_type = other DNA
cccgctgctctgctgcctgcccggggtaccaacatggcccagaagcgtcctgcctgcaccctgaagcctgagtgtgtccagcagctgctggtttgctcccaggaggccaagaagtcagcctactgcccctacagtcactttcctgtgggggctgccctgctcacccaggaggggagaatcttcaaagggtgcaacatagaaaatgcctgctacccgctgggcatctgtgctgaacggaccgctatccagaaggccgtctcagaagggtacaaggatttcagggcaattgctatcgccagtgacatgcaagatgattttatctctccatgtggggcctgcaggcaagtcatgagagagtttggcaccaactggcccgtgtacatgaccaagccggatggtacgtatattggtggaggcggttcgggtggagggggatctggtggcggaggtagcggtggcgggggatcaggtggcgggggatcaggtggcgggggatcaggtggcgggggatcaggtggcgggggatcaggtggcgggggatcaggtggcgggggatcagaggtgcagctggtggagtctgggggaggcttggtccagcctggagggtccctgagactctcctgtgcagcctctggattcaccttcgtagaccacgacatggactgggtccgccaggctccagggaaggggctggagtgggttggccgtactagaaacaaactaggaagttacaccacagaatacgccgcgtctgtgaaaggcagattcaccatctcaagagatgattcaaagaactcactgtatctgcaaatgaacagcctgaaaaccgaggacacggcggtgtactactgcgccagagagcctaaatactggatcgacttcgacctatgggggagaggtaccttggtcaccgtctcctcaggagggggcggatcaggcggaggtggatcgggagggggtggtagcgacatccagatgacccagtctccatcctccctgtctgcatctgtaggagacagagtcaccatcacttgccgggcaagtcagagcattagcagctatttaaattggtatcagcagaaaccagggaaagcccctaagctcctgatctatgctgcatccagtttgcaaagtggggtcccatcaaggttcagtggcagtggatgcggtacagatttcactctcaccatcagcagtctgcaacctgaagattttgcaacttactactgtcagcaaagctacatcgccccttacacttttggcggagggaccaaggttgagatcaaacaccatcatcatcaccat

SEQ ID NO: 642 - DNA, 1326 bp, synthetic construct
  source 1..1326: mol_type = other DNA
cccgctgctctgctgcctgcccggggtaccaacatggcccagaagcgtcctgcctgcaccctgaagcctgagtgtgtccagcagctgctggtttgctcccaggaggccaagaagtcagcctactgcccctacagtcactttcctgtgggggctgccctgctcacccaggaggggagaatcttcaaagggtgcaacatagaaaatgcctgctacccgctgggcatctgtgctgaacggaccgctatccagaaggccgtctcagaagggtacaaggatttcagggcaattgctatcgccagtgacatgcaagatgattttatctctccatgtggggcctgcaggcaagtcatgagagagtttggcaccaactggcccgtgtacatgaccaagccggatggtacgtatattggtggaggcggttcgggtggagggggatctggtggcggaggtagcggtggcgggggatcaggtggcgggggatcaggtggcgggggatcaggtggcgggggatcaggtggcgggggatcaggtggcgggggatcaggtggcgggggatcaggtggcgggggatcagacatccagatgacccagtctccatcttccgtgtctgcatctgtaggagacagagtcaccatcacttgtcgggcgagtcagggtattagcagctggttagcctggtatcagcagaaaccagggaaagcccctaagctcctgatctatgctgcatccagtttgcaaagtggggtcccatcaaggttcagcggcagtggatctgggacagatttcactctcaccatcagcagcctgcagcctgaagattttgcaacttattactgtcagcaaacaaatagtttcccttacacttttggcggagggaccaaggttgagatcaaaggagggggcggatcaggcggaggtggatcgggagggggtggtagcgaggtgcagctgttggagtctgggggaggcttggtacagcctggggggtccctgagactctcctgtgcagcctctggattcacctttagcaattatgccatgagctgggtccgccaggctccagggaaggggctggagtgggtctcagctattagtggtagtggtggtagcacatactacgcagactccgtgaagggccggttcaccatctccagagacaattccaagaacacgctgtatctgcaaatgaacagcctgagagccgaggacacggcggtgtactactgcgccaagggccctcctacataccacacaaactactactacatggacgtatggggcaagggtacaactgtcaccgtctcctcacaccatcatcatcaccat

SEQ ID NO: 643 - DNA, 1326 bp, synthetic construct
  source 1..1326: mol_type = other DNA
cccgctgctctgctgcctgcccggggtaccaacatggcccagaagcgtcctgcctgcaccctgaagcctgagtgtgtccagcagctgctggtttgctcccaggaggccaagaagtcagcctactgcccctacagtcactttcctgtgggggctgccctgctcacccaggaggggagaatcttcaaagggtgcaacatagaaaatgcctgctacccgctgggcatctgtgctgaacggaccgctatccagaaggccgtctcagaagggtacaaggatttcagggcaattgctatcgccagtgacatgcaagatgattttatctctccatgtggggcctgcaggcaagtcatgagagagtttggcaccaactggcccgtgtacatgaccaagccggatggtacgtatattggtggaggcggttcgggtggagggggatctggtggcggaggtagcggtggcgggggatcaggtggcgggggatcaggtggcgggggatcaggtggcgggggatcaggtggcgggggatcaggtggcgggggatcaggtggcgggggatcaggtggcgggggatcagacatccagatgacccagtctccatcttccgtgtctgcatctgtaggagacagagtcaccatcacttgtcgggcgagtcagggtattagcagctggttagcctggtatcagcagaaaccagggaaagcccctaagctcctgatctatgctgcatccagtttgcaaagtggggtcccatcaaggttcagcggcagtggatctgggacagatttcactctcaccatcagcagcctgcagcctgaagattttgcaacttattactgtcagcaaacaaatagtttcccttacacttttggcggagggaccaaggttgagatcaaaggagggggcggatcaggcggaggtggatcgggagggggtggtagcgaggtgcagctgttggagtctgggggaggcttggtacagcctggggggtccctgagactctcctgtgcagcctctggattcacctttagcagctatgtcatgatctgggtccgccaggctccagggaaggggctggagtgggtctcaagcattagtggtgacagcgtaacaacatactacgcagactccgtgaagggccggttcaccatctccagagacaattccaagaacacgctgtatctgcaaatgaacagcctgagagccgaggacacggcggtgtactactgcgccaagggccctcctacataccacacaaactactactacatggacgtatggggcaagggtacaactgtcaccgtctcctcacaccatcatcatcaccat

SEQ ID NO: 644 - DNA, 1320 bp, synthetic construct
  source 1..1320: mol_type = other DNA
cccgctgctctgctgcctgcccggggtaccaacatggcccagaagcgtcctgcctgcaccctgaagcctgagtgtgtccagcagctgctggtttgctcccaggaggccaagaagtcagcctactgcccctacagtcactttcctgtgggggctgccctgctcacccaggaggggagaatcttcaaagggtgcaacatagaaaatgcctgctacccgctgggcatctgtgctgaacggaccgctatccagaaggccgtctcagaagggtacaaggatttcagggcaattgctatcgccagtgacatgcaagatgattttatctctccatgtggggcctgcaggcaagtcatgagagagtttggcaccaactggcccgtgtacatgaccaagccggatggtacgtatattggtggaggcggttcgggtggagggggatctggtggcggaggtagcggtggcgggggatcaggtggcgggggatcaggtggcgggggatcaggtggcgggggatcaggtggcgggggatcaggtggcgggggatcaggtggcgggggatcaggtggcgggggatcagacatccagatgacccagtctccatcctccctgtctgcatctgtaggagacagagtcaccatcacttgccgggcaagtcagagcattagcagctatttaaattggtatcagcagaaaccagggaaagcccctaagctcctgatctatgctgcatccagtttgcaaagtggggtcccatcaaggttcagtggcagtggatctgggacagatttcactctcaccatcagcagtctgcaacctgaagattttgcaacttactactgtcagcaaagctacatcgccccttacacttttggcggagggaccaaggttgagatcaaaggagggggcggatcaggcggaggtggatcgggagggggtggtagcgaggtgcagctggtggagtctgggggaggcttggtccagcctggagggtccctgagactctcctgtgcagcctctggattcaccttcagtgaccactacatggactgggtccgccaggctccagggaaggggctggagtgggttggccgtactagaaacaaagctagtagttacaccacagaatacgccgcgtctgtgaaaggcagattcaccatctcaagagatgattcaaagaactcactgtatctgcaaatgaacagcctgaaaaccgaggacacggcggtgtactactgcgccagagagcctaaatactggatcgacttcgacctatgggggagaggtaccttggtcaccgtctcctcacaccatcatcatcaccat

SEQ ID NO: 645 - DNA, 1293 bp, synthetic construct
  source 1..1293: mol_type = other DNA
cccgctgctctgctgcctgcccggggtaccaacatggcccagaagcgtcctgcctgcaccctgaagcctgagtgtgtccagcagctgctggtttgctcccaggaggccaagaagtcagcctactgcccctacagtcactttcctgtgggggctgccctgctcacccaggaggggagaatcttcaaagggtgcaacatagaaaatgcctgctacccgctgggcatctgtgctgaacggaccgctatccagaaggccgtctcagaagggtacaaggatttcagggcaattgctatcgccagtgacatgcaagatgattttatctctccatgtggggcctgcaggcaagtcatgagagagtttggcaccaactggcccgtgtacatgaccaagccggatggtacgtatattggtggaggcggttcgggtggagggggatctggtggcggaggtagcggtggcgggggatcaggtggcgggggatcaggtggcgggggatcaggtggcgggggatcaggtggcgggggatcaggtggcgggggatcaggtggcgggggatcaggtggcgggggatcagacatccagatgacccagtctccatcctccctgtctgcatctgtaggagacagagtcaccatcacttgccgggcaagtcagagcattagcagctatttaaattggtatcagcagaaaccagggaaagcccctaagctcctgatctatgctgcatccagtttgcaaagtggggtcccatcaaggttcagtggcagtggatctgggacagatttcactctcaccatcagcagtctgcaacctgaagattttgcaacttactactgtcagcaaagctacatcgccccttacacttttggcggagggaccaaggttgagatcaaaggagggggcggatcaggcggaggtggatcgggagggggtggtagcgaggtgcagctggtggagtctgggggaggcttggtacagccagggcggtccctgagactctcctgtacagcttctggattcaccttcagtgaccacgacatgaactgggtccgccaggctccagggaaggggctggagtgggttggccgtactagaaacgccgctggaagttacaccacagaatacgccgcgtctgtgaaaggcagattcaccatctcaagagatgattcaaagaactcactgtatctgcaaatgaacagcctgaaaaccgaggacacggcggtgtactactgcgccagagagcctaaatactggatcgacttcgacctatgggggcaccatcatcatcaccat

SEQ ID NO: 646 - DNA, 1320 bp, synthetic construct
  source 1..1320: mol_type = other DNA
cccgctgctctgctgcctgcccggggtaccaacatggcccagaagcgtcctgcctgcaccctgaagcctgagtgtgtccagcagctgctggtttgctcccaggaggccaagaagtcagcctactgcccctacagtcactttcctgtgggggctgccctgctcacccaggaggggagaatcttcaaagggtgcaacatagaaaatgcctgctacccgctgggcatctgtgctgaacggaccgctatccagaaggccgtctcagaagggtacaaggatttcagggcaattgctatcgccagtgacatgcaagatgattttatctctccatgtggggcctgcaggcaagtcatgagagagtttggcaccaactggcccgtgtacatgaccaagccggatggtacgtatattggtggaggcggttcgggtggagggggatctggtggcggaggtagcggtggcgggggatcaggtggcgggggatcaggtggcgggggatcaggtggcgggggatcaggtggcgggggatcaggtggcgggggatcaggtggcgggggatcaggtggcgggggatcagaggtgcagctggtggagtctgggggaggcttggtccagcctggagggtccctgagactctcctgtgcagcctctggattcaccttcgtagaccacgacatggactgggtccgccaggctccagggaaggggctggagtgggttggccgtactagaaacaaactaggaagttacaccacagaatacgccgcgtctgtgaaaggcagattcaccatctcaagagatgattcaaagaactcactgtatctgcaaatgaacagcctgaaaaccgaggacacggcggtgtactactgcgccagagagcctaaatactggatcgacttcgacctatgggggagaggtaccttggtcaccgtctcctcaggagggggcggatcaggcggaggtggatcgggagggggtggtagcgacatccagatgacccagtctccatcctccctgtctgcatctgtaggagacagagtcaccatcacttgccgggcaagtcagagcattagcagctatttaaattggtatcagcagaaaccagggaaagcccctaagctcctgatctatgctgcatccagtttgcaaagtggggtcccatcaaggttcagtggcagtggatgcggtacagatttcactctcaccatcagcagtctgcaacctgaagattttgcaacttactactgtcagcaaagctacatcgccccttacacttttggcggagggaccaaggttgagatcaaacaccatcatcatcaccat

SEQ ID NO: 647 - DNA, 1341 bp, synthetic construct
  source 1..1341: mol_type = other DNA
cccgctgctctgctgcctgcccggggtaccaacatggcccagaagcgtcctgcctgcaccctgaagcctgagtgtgtccagcagctgctggtttgctcccaggaggccaagaagtcagcctactgcccctacagtcactttcctgtgggggctgccctgctcacccaggaggggagaatcttcaaagggtgcaacatagaaaatgcctgctacccgctgggcatctgtgctgaacggaccgctatccagaaggccgtctcagaagggtacaaggatttcagggcaattgctatcgccagtgacatgcaagatgattttatctctccatgtggggcctgcaggcaagtcatgagagagtttggcaccaactggcccgtgtacatgaccaagccggatggtacgtatattggtggaggcggttcgggtggagggggatctggtggcggaggtagcggtggcgggggatcaggtggcgggggatcaggtggcgggggatcaggtggcgggggatcaggtggcgggggatcaggtggcgggggatcaggtggcgggggatcaggtggcgggggatcaggtggcgggggatcagacatccagatgacccagtctccatcttccgtgtctgcatctgtaggagacagagtcaccatcacttgtcgggcgagtcagggtattagcagctggttagcctggtatcagcagaaaccagggaaagcccctaagctcctgatctatgctgcatccagtttgcaaagtggggtcccatcaaggttcagcggcagtggatctgggacagatttcactctcaccatcagcagcctgcagcctgaagattttgcaacttattactgtcagcaaacaaatagtttcccttacacttttggcggagggaccaaggttgagatcaaaggagggggcggatcaggcggaggtggatcgggagggggtggtagcgaggtgcagctgttggagtctgggggaggcttggtacagcctggggggtccctgagactctcctgtgcagcctctggattcacctttagcaattatgccatgagctgggtccgccaggctccagggaaggggctggagtgggtctcagctattagtggtagtggtggtagcacatactacgcagactccgtgaagggccggttcaccatctccagagacaattccaagaacacgctgtatctgcaaatgaacagcctgagagccgaggacacggcggtgtactactgcgccaagggccctcctacataccacacaaactactactacatggacgtatggggcaagggtacaactgtcaccgtctcctcacaccatcatcatcaccat

SEQ ID NO: 648 - DNA, 1341 bp, synthetic construct
  source 1..1341: mol_type = other DNA
cccgctgctctgctgcctgcccggggtaccaacatggcccagaagcgtcctgcctgcaccctgaagcctgagtgtgtccagcagctgctggtttgctcccaggaggccaagaagtcagcctactgcccctacagtcactttcctgtgggggctgccctgctcacccaggaggggagaatcttcaaagggtgcaacatagaaaatgcctgctacccgctgggcatctgtgctgaacggaccgctatccagaaggccgtctcagaagggtacaaggatttcagggcaattgctatcgccagtgacatgcaagatgattttatctctccatgtggggcctgcaggcaagtcatgagagagtttggcaccaactggcccgtgtacatgaccaagccggatggtacgtatattggtggaggcggttcgggtggagggggatctggtggcggaggtagcggtggcgggggatcaggtggcgggggatcaggtggcgggggatcaggtggcgggggatcaggtggcgggggatcaggtggcgggggatcaggtggcgggggatcaggtggcgggggatcaggtggcgggggatcagacatccagatgacccagtctccatcttccgtgtctgcatctgtaggagacagagtcaccatcacttgtcgggcgagtcagggtattagcagctggttagcctggtatcagcagaaaccagggaaagcccctaagctcctgatctatgctgcatccagtttgcaaagtggggtcccatcaaggttcagcggcagtggatctgggacagatttcactctcaccatcagcagcctgcagcctgaagattttgcaacttattactgtcagcaaacaaatagtttcccttacacttttggcggagggaccaaggttgagatcaaaggagggggcggatcaggcggaggtggatcgggagggggtggtagcgaggtgcagctgttggagtctgggggaggcttggtacagcctggggggtccctgagactctcctgtgcagcctctggattcacctttagcagctatgtcatgatctgggtccgccaggctccagggaaggggctggagtgggtctcaagcattagtggtgacagcgtaacaacatactacgcagactccgtgaagggccggttcaccatctccagagacaattccaagaacacgctgtatctgcaaatgaacagcctgagagccgaggacacggcggtgtactactgcgccaagggccctcctacataccacacaaactactactacatggacgtatggggcaagggtacaactgtcaccgtctcctcacaccatcatcatcaccat

SEQ ID NO: 649 - DNA, 1335 bp, synthetic construct
  source 1..1335: mol_type = other DNA
cccgctgctctgctgcctgcccggggtaccaacatggcccagaagcgtcctgcctgcaccctgaagcctgagtgtgtccagcagctgctggtttgctcccaggaggccaagaagtcagcctactgcccctacagtcactttcctgtgggggctgccctgctcacccaggaggggagaatcttcaaagggtgcaacatagaaaatgcctgctacccgctgggcatctgtgctgaacggaccgctatccagaaggccgtctcagaagggtacaaggatttcagggcaattgctatcgccagtgacatgcaagatgattttatctctccatgtggggcctgcaggcaagtcatgagagagtttggcaccaactggcccgtgtacatgaccaagccggatggtacgtatattggtggaggcggttcgggtggagggggatctggtggcggaggtagcggtggcgggggatcaggtggcgggggatcaggtggcgggggatcaggtggcgggggatcaggtggcgggggatcaggtggcgggggatcaggtggcgggggatcaggtggcgggggatcaggtggcgggggatcagacatccagatgacccagtctccatcctccctgtctgcatctgtaggagacagagtcaccatcacttgccgggcaagtcagagcattagcagctatttaaattggtatcagcagaaaccagggaaagcccctaagctcctgatctatgctgcatccagtttgcaaagtggggtcccatcaaggttcagtggcagtggatctgggacagatttcactctcaccatcagcagtctgcaacctgaagattttgcaacttactactgtcagcaaagctacatcgccccttacacttttggcggagggaccaaggttgagatcaaaggagggggcggatcaggcggaggtggatcgggagggggtggtagcgaggtgcagctggtggagtctgggggaggcttggtccagcctggagggtccctgagactctcctgtgcagcctctggattcaccttcagtgaccactacatggactgggtccgccaggctccagggaaggggctggagtgggttggccgtactagaaacaaagctagtagttacaccacagaatacgccgcgtctgtgaaaggcagattcaccatctcaagagatgattcaaagaactcactgtatctgcaaatgaacagcctgaaaaccgaggacacggcggtgtactactgcgccagagagcctaaatactggatcgacttcgacctatgggggagaggtaccttggtcaccgtctcctcacaccatcatcatcaccat

SEQ ID NO: 650 - DNA, 1308 bp, synthetic construct
  source 1..1308: mol_type = other DNA
cccgctgctctgctgcctgcccggggtaccaacatggcccagaagcgtcctgcctgcaccctgaagcctgagtgtgtccagcagctgctggtttgctcccaggaggccaagaagtcagcctactgcccctacagtcactttcctgtgggggctgccctgctcacccaggaggggagaatcttcaaagggtgcaacatagaaaatgcctgctacccgctgggcatctgtgctgaacggaccgctatccagaaggccgtctcagaagggtacaaggatttcagggcaattgctatcgccagtgacatgcaagatgattttatctctccatgtggggcctgcaggcaagtcatgagagagtttggcaccaactggcccgtgtacatgaccaagccggatggtacgtatattggtggaggcggttcgggtggagggggatctggtggcggaggtagcggtggcgggggatcaggtggcgggggatcaggtggcgggggatcaggtggcgggggatcaggtggcgggggatcaggtggcgggggatcaggtggcgggggatcaggtggcgggggatcaggtggcgggggatcagacatccagatgacccagtctccatcctccctgtctgcatctgtaggagacagagtcaccatcacttgccgggcaagtcagagcattagcagctatttaaattggtatcagcagaaaccagggaaagcccctaagctcctgatctatgctgcatccagtttgcaaagtggggtcccatcaaggttcagtggcagtggatctgggacagatttcactctcaccatcagcagtctgcaacctgaagattttgcaacttactactgtcagcaaagctacatcgccccttacacttttggcggagggaccaaggttgagatcaaaggagggggcggatcaggcggaggtggatcgggagggggtggtagcgaggtgcagctggtggagtctgggggaggcttggtacagccagggcggtccctgagactctcctgtacagcttctggattcaccttcagtgaccacgacatgaactgggtccgccaggctccagggaaggggctggagtgggttggccgtactagaaacgccgctggaagttacaccacagaatacgccgcgtctgtgaaaggcagattcaccatctcaagagatgattcaaagaactcactgtatctgcaaatgaacagcctgaaaaccgaggacacggcggtgtactactgcgccagagagcctaaatactggatcgacttcgacctatgggggcaccatcatcatcaccat

SEQ ID NO: 651 - DNA, 1335 bp, synthetic construct
  source 1..1335: mol_type = other DNA
cccgctgctctgctgcctgcccggggtaccaacatggcccagaagcgtcctgcctgcaccctgaagcctgagtgtgtccagcagctgctggtttgctcccaggaggccaagaagtcagcctactgcccctacagtcactttcctgtgggggctgccctgctcacccaggaggggagaatcttcaaagggtgcaacatagaaaatgcctgctacccgctgggcatctgtgctgaacggaccgctatccagaaggccgtctcagaagggtacaaggatttcagggcaattgctatcgccagtgacatgcaagatgattttatctctccatgtggggcctgcaggcaagtcatgagagagtttggcaccaactggcccgtgtacatgaccaagccggatggtacgtatattggtggaggcggttcgggtggagggggatctggtggcggaggtagcggtggcgggggatcaggtggcgggggatcaggtggcgggggatcaggtggcgggggatcaggtggcgggggatcaggtggcgggggatcaggtggcgggggatcaggtggcgggggatcaggtggcgggggatcagaggtgcagctggtggagtctgggggaggcttggtccagcctggagggtccctgagactctcctgtgcagcctctggattcaccttcgtagaccacgacatggactgggtccgccaggctccagggaaggggctggagtgggttggccgtactagaaacaaactaggaagttacaccacagaatacgccgcgtctgtgaaaggcagattcaccatctcaagagatgattcaaagaactcactgtatctgcaaatgaacagcctgaaaaccgaggacacggcggtgtactactgcgccagagagcctaaatactggatcgacttcgacctatgggggagaggtaccttggtcaccgtctcctcaggagggggcggatcaggcggaggtggatcgggagggggtggtagcgacatccagatgacccagtctccatcctccctgtctgcatctgtaggagacagagtcaccatcacttgccgggcaagtcagagcattagcagctatttaaattggtatcagcagaaaccagggaaagcccctaagctcctgatctatgctgcatccagtttgcaaagtggggtcccatcaaggttcagtggcagtggatgcggtacagatttcactctcaccatcagcagtctgcaacctgaagattttgcaacttactactgtcagcaaagctacatcgccccttacacttttggcggagggaccaaggttgagatcaaacaccatcatcatcaccat

SEQ ID NO: 652 - DNA, 1176 bp, synthetic construct
  source 1..1176: mol_type = other DNA
cccgctgctctgctgcctgcccggggtaccaacatggcccagaagcgtcctgcctgcaccctgaagcctgagtgtgtccagcagctgctggtttgctcccaggaggccaagaagtcagcctactgcccctacagtcactttcctgtgggggctgccctgctcacccaggaggggagaatcttcaaagggtgcaacatagaaaatgcctgctacccgctgggcatctgtgctgaacggaccgctatccagaaggccgtctcagaagggtacaaggatttcagggcaattgctatcgccagtgacatgcaagatgattttatctctccatgtggggcctgcaggcaagtcatgagagagtttggcaccaactggcccgtgtacatgaccaagccggatggtacgtatattggtggcgggggatcagaggtgcagctgttggagtctgggggaggcttggtacagcctggggggtccctgagactctcctgtgcagcctctggattcacctttagcaattatgccatgagctgggtccgccaggctccagggaaggggctggagtgggtctcagctattagtggtagtggtggtagcacatactacgcagactccgtgaagggccggttcaccatctccagagacaattccaagaacacgctgtatctgcaaatgaacagcctgagagccgaggacacggcggtgtactactgcgccaagggccctcctacataccacacaaactactactacatggacgtatggggcaagggtacaactgtcaccgtctcctcaggagggggcggatcaggcggaggtggatcgggagggggtggtagcgacatccagatgacccagtctccatcttccgtgtctgcatctgtaggagacagagtcaccatcacttgtcgggcgagtcagggtattagcagctggttagcctggtatcagcagaaaccagggaaagcccctaagctcctgatctatgctgcatccagtttgcaaagtggggtcccatcaaggttcagcggcagtggatctgggacagatttcactctcaccatcagcagcctgcagcctgaagattttgcaacttattactgtcagcaaacaaatagtttcccttacacttttggcggagggaccaaggttgagatcaaacaccatcatcatcaccat

SEQ ID NO: 653 - DNA, 1176 bp, synthetic construct
  source 1..1176: mol_type = other DNA
cccgctgctctgctgcctgcccggggtaccaacatggcccagaagcgtcctgcctgcaccctgaagcctgagtgtgtccagcagctgctggtttgctcccaggaggccaagaagtcagcctactgcccctacagtcactttcctgtgggggctgccctgctcacccaggaggggagaatcttcaaagggtgcaacatagaaaatgcctgctacccgctgggcatctgtgctgaacggaccgctatccagaaggccgtctcagaagggtacaaggatttcagggcaattgctatcgccagtgacatgcaagatgattttatctctccatgtggggcctgcaggcaagtcatgagagagtttggcaccaactggcccgtgtacatgaccaagccggatggtacgtatattggtggcgggggatcagaggtgcagctgttggagtctgggggaggcttggtacagcctggggggtccctgagactctcctgtgcagcctctggattcacctttagcagctatgtcatgatctgggtccgccaggctccagggaaggggctggagtgggtctcaagcattagtggtgacagcgtaacaacatactacgcagactccgtgaagggccggttcaccatctccagagacaattccaagaacacgctgtatctgcaaatgaacagcctgagagccgaggacacggcggtgtactactgcgccaagggccctcctacataccacacaaactactactacatggacgtatggggcaagggtacaactgtcaccgtctcctcaggagggggcggatcaggcggaggtggatcgggagggggtggtagcgacatccagatgacccagtctccatcttccgtgtctgcatctgtaggagacagagtcaccatcacttgtcgggcgagtcagggtattagcagctggttagcctggtatcagcagaaaccagggaaagcccctaagctcctgatctatgctgcatccagtttgcaaagtggggtcccatcaaggttcagcggcagtggatctgggacagatttcactctcaccatcagcagcctgcagcctgaagattttgcaacttattactgtcagcaaacaaatagtttcccttacacttttggcggagggaccaaggttgagatcaaacaccatcatcatcaccat

SEQ ID NO: 654 - DNA, 1170 bp, synthetic construct
  source 1..1170: mol_type = other DNA
cccgctgctctgctgcctgcccggggtaccaacatggcccagaagcgtcctgcctgcaccctgaagcctgagtgtgtccagcagctgctggtttgctcccaggaggccaagaagtcagcctactgcccctacagtcactttcctgtgggggctgccctgctcacccaggaggggagaatcttcaaagggtgcaacatagaaaatgcctgctacccgctgggcatctgtgctgaacggaccgctatccagaaggccgtctcagaagggtacaaggatttcagggcaattgctatcgccagtgacatgcaagatgattttatctctccatgtggggcctgcaggcaagtcatgagagagtttggcaccaactggcccgtgtacatgaccaagccggatggtacgtatattggtggcgggggatcagaggtgcagctggtggagtctgggggaggcttggtccagcctggagggtccctgagactctcctgtgcagcctctggattcaccttcagtgaccactacatggactgggtccgccaggctccagggaaggggctggagtgggttggccgtactagaaacaaagctagtagttacaccacagaatacgccgcgtctgtgaaaggcagattcaccatctcaagagatgattcaaagaactcactgtatctgcaaatgaacagcctgaaaaccgaggacacggcggtgtactactgcgccagagagcctaaatactggatcgacttcgacctatgggggagaggtaccttggtcaccgtctcctcaggagggggcggatcaggcggaggtggatcgggagggggtggtagcgacatccagatgacccagtctccatcctccctgtctgcatctgtaggagacagagtcaccatcacttgccgggcaagtcagagcattagcagctatttaaattggtatcagcagaaaccagggaaagcccctaagctcctgatctatgctgcatccagtttgcaaagtggggtcccatcaaggttcagtggcagtggatctgggacagatttcactctcaccatcagcagtctgcaacctgaagattttgcaacttactactgtcagcaaagctacatcgccccttacacttttggcggagggaccaaggttgagatcaaacaccatcatcatcaccat

SEQ ID NO: 655 - DNA, 1143 bp, synthetic construct
  source 1..1143: mol_type = other DNA
cccgctgctctgctgcctgcccggggtaccaacatggcccagaagcgtcctgcctgcaccctgaagcctgagtgtgtccagcagctgctggtttgctcccaggaggccaagaagtcagcctactgcccctacagtcactttcctgtgggggctgccctgctcacccaggaggggagaatcttcaaagggtgcaacatagaaaatgcctgctacccgctgggcatctgtgctgaacggaccgctatccagaaggccgtctcagaagggtacaaggatttcagggcaattgctatcgccagtgacatgcaagatgattttatctctccatgtggggcctgcaggcaagtcatgagagagtttggcaccaactggcccgtgtacatgaccaagccggatggtacgtatattggtggcgggggatcagaggtgcagctggtggagtctgggggaggcttggtacagccagggcggtccctgagactctcctgtacagcttctggattcaccttcagtgaccacgacatgaactgggtccgccaggctccagggaaggggctggagtgggttggccgtactagaaacgccgctggaagttacaccacagaatacgccgcgtctgtgaaaggcagattcaccatctcaagagatgattcaaagaactcactgtatctgcaaatgaacagcctgaaaaccgaggacacggcggtgtactactgcgccagagagcctaaatactggatcgacttcgacctatgggggggagggggcggatcaggcggaggtggatcgggagggggtggtagcgacatccagatgacccagtctccatcctccctgtctgcatctgtaggagacagagtcaccatcacttgccgggcaagtcagagcattagcagctatttaaattggtatcagcagaaaccagggaaagcccctaagctcctgatctatgctgcatccagtttgcaaagtggggtcccatcaaggttcagtggcagtggatctgggacagatttcactctcaccatcagcagtctgcaacctgaagattttgcaacttactactgtcagcaaagctacatcgccccttacacttttggcggagggaccaaggttgagatcaaacaccatcatcatcaccat

SEQ ID NO: 656 - DNA, 1170 bp, synthetic construct
  source 1..1170: mol_type = other DNA
cccgctgctctgctgcctgcccggggtaccaacatggcccagaagcgtcctgcctgcaccctgaagcctgagtgtgtccagcagctgctggtttgctcccaggaggccaagaagtcagcctactgcccctacagtcactttcctgtgggggctgccctgctcacccaggaggggagaatcttcaaagggtgcaacatagaaaatgcctgctacccgctgggcatctgtgctgaacggaccgctatccagaaggccgtctcagaagggtacaaggatttcagggcaattgctatcgccagtgacatgcaagatgattttatctctccatgtggggcctgcaggcaagtcatgagagagtttggcaccaactggcccgtgtacatgaccaagccggatggtacgtatattggtggcgggggatcagacatccagatgacccagtctccatcctccctgtctgcatctgtaggagacagagtcaccatcacttgccgggcaagtcagagcattagcagctatttaaattggtatcagcagaaaccagggaaagcccctaagctcctgatctatgctgcatccagtttgcaaagtggggtcccatcaaggttcagtggcagtggatgcggtacagatttcactctcaccatcagcagtctgcaacctgaagattttgcaacttactactgtcagcaaagctacatcgccccttacacttttggcggagggaccaaggttgagatcaaaggagggggcggatcaggcggaggtggatcgggagggggtggtagcgaggtgcagctggtggagtctgggggaggcttggtccagcctggagggtccctgagactctcctgtgcagcctctggattcaccttcgtagaccacgacatggactgggtccgccaggctccagggaaggggctggagtgggttggccgtactagaaacaaactaggaagttacaccacagaatacgccgcgtctgtgaaaggcagattcaccatctcaagagatgattcaaagaactcactgtatctgcaaatgaacagcctgaaaaccgaggacacggcggtgtactactgcgccagagagcctaaatactggatcgacttcgacctatgggggagaggtaccttggtcaccgtctcctcacaccatcatcatcaccat

SEQ ID NO: 657 - DNA, 1206 bp, synthetic construct
  source 1..1206: mol_type = other DNA
cccgctgctctgctgcctgcccggggtaccaacatggcccagaagcgtcctgcctgcaccctgaagcctgagtgtgtccagcagctgctggtttgctcccaggaggccaagaagtcagcctactgcccctacagtcactttcctgtgggggctgccctgctcacccaggaggggagaatcttcaaagggtgcaacatagaaaatgcctgctacccgctgggcatctgtgctgaacggaccgctatccagaaggccgtctcagaagggtacaaggatttcagggcaattgctatcgccagtgacatgcaagatgattttatctctccatgtggggcctgcaggcaagtcatgagagagtttggcaccaactggcccgtgtacatgaccaagccggatggtacgtatattggagggggcggatcaggcggaggtggatcgggagggggtggtagcgaggtgcagctgttggagtctgggggaggcttggtacagcctggggggtccctgagactctcctgtgcagcctctggattcacctttagcaattatgccatgagctgggtccgccaggctccagggaaggggctggagtgggtctcagctattagtggtagtggtggtagcacatactacgcagactccgtgaagggccggttcaccatctccagagacaattccaagaacacgctgtatctgcaaatgaacagcctgagagccgaggacacggcggtgtactactgcgccaagggccctcctacataccacacaaactactactacatggacgtatggggcaagggtacaactgtcaccgtctcctcaggagggggcggatcaggcggaggtggatcgggagggggtggtagcgacatccagatgacccagtctccatcttccgtgtctgcatctgtaggagacagagtcaccatcacttgtcgggcgagtcagggtattagcagctggttagcctggtatcagcagaaaccagggaaagcccctaagctcctgatctatgctgcatccagtttgcaaagtggggtcccatcaaggttcagcggcagtggatctgggacagatttcactctcaccatcagcagcctgcagcctgaagattttgcaacttattactgtcagcaaacaaatagtttcccttacacttttggcggagggaccaaggttgagatcaaacaccatcatcatcaccat

SEQ ID NO: 658 - DNA, 1206 bp, synthetic construct
  source 1..1206: mol_type = other DNA
cccgctgctctgctgcctgcccggggtaccaacatggcccagaagcgtcctgcctgcaccctgaagcctgagtgtgtccagcagctgctggtttgctcccaggaggccaagaagtcagcctactgcccctacagtcactttcctgtgggggctgccctgctcacccaggaggggagaatcttcaaagggtgcaacatagaaaatgcctgctacccgctgggcatctgtgctgaacggaccgctatccagaaggccgtctcagaagggtacaaggatttcagggcaattgctatcgccagtgacatgcaagatgattttatctctccatgtggggcctgcaggcaagtcatgagagagtttggcaccaactggcccgtgtacatgaccaagccggatggtacgtatattggagggggcggatcaggcggaggtggatcgggagggggtggtagcgaggtgcagctgttggagtctgggggaggcttggtacagcctggggggtccctgagactctcctgtgcagcctctggattcacctttagcagctatgtcatgatctgggtccgccaggctccagggaaggggctggagtgggtctcaagcattagtggtgacagcgtaacaacatactacgcagactccgtgaagggccggttcaccatctccagagacaattccaagaacacgctgtatctgcaaatgaacagcctgagagccgaggacacggcggtgtactactgcgccaagggccctcctacataccacacaaactactactacatggacgtatggggcaagggtacaactgtcaccgtctcctcaggagggggcggatcaggcggaggtggatcgggagggggtggtagcgacatccagatgacccagtctccatcttccgtgtctgcatctgtaggagacagagtcaccatcacttgtcgggcgagtcagggtattagcagctggttagcctggtatcagcagaaaccagggaaagcccctaagctcctgatctatgctgcatccagtttgcaaagtggggtcccatcaaggttcagcggcagtggatctgggacagatttcactctcaccatcagcagcctgcagcctgaagattttgcaacttattactgtcagcaaacaaatagtttcccttacacttttggcggagggaccaaggttgagatcaaacaccatcatcatcaccat

SEQ ID NO: 659 - DNA, 1200 bp, synthetic construct
  source 1..1200: mol_type = other DNA
cccgctgctctgctgcctgcccggggtaccaacatggcccagaagcgtcctgcctgcaccctgaagcctgagtgtgtccagcagctgctggtttgctcccaggaggccaagaagtcagcctactgcccctacagtcactttcctgtgggggctgccctgctcacccaggaggggagaatcttcaaagggtgcaacatagaaaatgcctgctacccgctgggcatctgtgctgaacggaccgctatccagaaggccgtctcagaagggtacaaggatttcagggcaattgctatcgccagtgacatgcaagatgattttatctctccatgtggggcctgcaggcaagtcatgagagagtttggcaccaactggcccgtgtacatgaccaagccggatggtacgtatattggagggggcggatcaggcggaggtggatcgggagggggtggtagcgaggtgcagctggtggagtctgggggaggcttggtccagcctggagggtccctgagactctcctgtgcagcctctggattcaccttcagtgaccactacatggactgggtccgccaggctccagggaaggggctggagtgggttggccgtactagaaacaaagctagtagttacaccacagaatacgccgcgtctgtgaaaggcagattcaccatctcaagagatgattcaaagaactcactgtatctgcaaatgaacagcctgaaaaccgaggacacggcggtgtactactgcgccagagagcctaaatactggatcgacttcgacctatgggggagaggtaccttggtcaccgtctcctcaggagggggcggatcaggcggaggtggatcgggagggggtggtagcgacatccagatgacccagtctccatcctccctgtctgcatctgtaggagacagagtcaccatcacttgccgggcaagtcagagcattagcagctatttaaattggtatcagcagaaaccagggaaagcccctaagctcctgatctatgctgcatccagtttgcaaagtggggtcccatcaaggttcagtggcagtggatctgggacagatttcactctcaccatcagcagtctgcaacctgaagattttgcaacttactactgtcagcaaagctacatcgccccttacacttttggcggagggaccaaggttgagatcaaacaccatcatcatcaccat

SEQ ID NO: 660 - DNA, 1173 bp, synthetic construct
  source 1..1173: mol_type = other DNA
cccgctgctctgctgcctgcccggggtaccaacatggcccagaagcgtcctgcctgcaccctgaagcctgagtgtgtccagcagctgctggtttgctcccaggaggccaagaagtcagcctactgcccctacagtcactttcctgtgggggctgccctgctcacccaggaggggagaatcttcaaagggtgcaacatagaaaatgcctgctacccgctgggcatctgtgctgaacggaccgctatccagaaggccgtctcagaagggtacaaggatttcagggcaattgctatcgccagtgacatgcaagatgattttatctctccatgtggggcctgcaggcaagtcatgagagagtttggcaccaactggcccgtgtacatgaccaagccggatggtacgtatattggagggggcggatcaggcggaggtggatcgggagggggtggtagcgaggtgcagctggtggagtctgggggaggcttggtacagccagggcggtccctgagactctcctgtacagcttctggattcaccttcagtgaccacgacatgaactgggtccgccaggctccagggaaggggctggagtgggttggccgtactagaaacgccgctggaagttacaccacagaatacgccgcgtctgtgaaaggcagattcaccatctcaagagatgattcaaagaactcactgtatctgcaaatgaacagcctgaaaaccgaggacacggcggtgtactactgcgccagagagcctaaatactggatcgacttcgacctatgggggggagggggcggatcaggcggaggtggatcgggagggggtggtagcgacatccagatgacccagtctccatcctccctgtctgcatctgtaggagacagagtcaccatcacttgccgggcaagtcagagcattagcagctatttaaattggtatcagcagaaaccagggaaagcccctaagctcctgatctatgctgcatccagtttgcaaagtggggtcccatcaaggttcagtggcagtggatctgggacagatttcactctcaccatcagcagtctgcaacctgaagattttgcaacttactactgtcagcaaagctacatcgccccttacacttttggcggagggaccaaggttgagatcaaacaccatcatcatcaccat

SEQ ID NO: 661 - DNA, 1200 bp, synthetic construct
  source 1..1200: mol_type = other DNA
cccgctgctctgctgcctgcccggggtaccaacatggcccagaagcgtcctgcctgcaccctgaagcctgagtgtgtccagcagctgctggtttgctcccaggaggccaagaagtcagcctactgcccctacagtcactttcctgtgggggctgccctgctcacccaggaggggagaatcttcaaagggtgcaacatagaaaatgcctgctacccgctgggcatctgtgctgaacggaccgctatccagaaggccgtctcagaagggtacaaggatttcagggcaattgctatcgccagtgacatgcaagatgattttatctctccatgtggggcctgcaggcaagtcatgagagagtttggcaccaactggcccgtgtacatgaccaagccggatggtacgtatattggagggggcggatcaggcggaggtggatcgggagggggtggtagcgacatccagatgacccagtctccatcctccctgtctgcatctgtaggagacagagtcaccatcacttgccgggcaagtcagagcattagcagctatttaaattggtatcagcagaaaccagggaaagcccctaagctcctgatctatgctgcatccagtttgcaaagtggggtcccatcaaggttcagtggcagtggatgcggtacagatttcactctcaccatcagcagtctgcaacctgaagattttgcaacttactactgtcagcaaagctacatcgccccttacacttttggcggagggaccaaggttgagatcaaaggagggggcggatcaggcggaggtggatcgggagggggtggtagcgaggtgcagctggtggagtctgggggaggcttggtccagcctggagggtccctgagactctcctgtgcagcctctggattcaccttcgtagaccacgacatggactgggtccgccaggctccagggaaggggctggagtgggttggccgtactagaaacaaactaggaagttacaccacagaatacgccgcgtctgtgaaaggcagattcaccatctcaagagatgattcaaagaactcactgtatctgcaaatgaacagcctgaaaaccgaggacacggcggtgtactactgcgccagagagcctaaatactggatcgacttcgacctatgggggagaggtaccttggtcaccgtctcctcacaccatcatcatcaccat

SEQ ID NO: 662 - DNA, 1221 bp, synthetic construct
  source 1..1221: mol_type = other DNA
cccgctgctctgctgcctgcccggggtaccaacatggcccagaagcgtcctgcctgcaccctgaagcctgagtgtgtccagcagctgctggtttgctcccaggaggccaagaagtcagcctactgcccctacagtcactttcctgtgggggctgccctgctcacccaggaggggagaatcttcaaagggtgcaacatagaaaatgcctgctacccgctgggcatctgtgctgaacggaccgctatccagaaggccgtctcagaagggtacaaggatttcagggcaattgctatcgccagtgacatgcaagatgattttatctctccatgtggggcctgcaggcaagtcatgagagagtttggcaccaactggcccgtgtacatgaccaagccggatggtacgtatattggtggaggcggttcgggtggagggggatctggtggcggaggtagcggtggcgggggatcagaggtgcagctgttggagtctgggggaggcttggtacagcctggggggtccctgagactctcctgtgcagcctctggattcacctttagcaattatgccatgagctgggtccgccaggctccagggaaggggctggagtgggtctcagctattagtggtagtggtggtagcacatactacgcagactccgtgaagggccggttcaccatctccagagacaattccaagaacacgctgtatctgcaaatgaacagcctgagagccgaggacacggcggtgtactactgcgccaagggccctcctacataccacacaaactactactacatggacgtatggggcaagggtacaactgtcaccgtctcctcaggagggggcggatcaggcggaggtggatcgggagggggtggtagcgacatccagatgacccagtctccatcttccgtgtctgcatctgtaggagacagagtcaccatcacttgtcgggcgagtcagggtattagcagctggttagcctggtatcagcagaaaccagggaaagcccctaagctcctgatctatgctgcatccagtttgcaaagtggggtcccatcaaggttcagcggcagtggatctgggacagatttcactctcaccatcagcagcctgcagcctgaagattttgcaacttattactgtcagcaaacaaatagtttcccttacacttttggcggagggaccaaggttgagatcaaacaccatcatcatcaccat

SEQ ID NO: 663 - DNA, 1221 bp, synthetic construct
  source 1..1221: mol_type = other DNA
cccgctgctctgctgcctgcccggggtaccaacatggcccagaagcgtcctgcctgcaccctgaagcctgagtgtgtccagcagctgctggtttgctcccaggaggccaagaagtcagcctactgcccctacagtcactttcctgtgggggctgccctgctcacccaggaggggagaatcttcaaagggtgcaacatagaaaatgcctgctacccgctgggcatctgtgctgaacggaccgctatccagaaggccgtctcagaagggtacaaggatttcagggcaattgctatcgccagtgacatgcaagatgattttatctctccatgtggggcctgcaggcaagtcatgagagagtttggcaccaactggcccgtgtacatgaccaagccggatggtacgtatattggtggaggcggttcgggtggagggggatctggtggcggaggtagcggtggcgggggatcagaggtgcagctgttggagtctgggggaggcttggtacagcctggggggtccctgagactctcctgtgcagcctctggattcacctttagcagctatgtcatgatctgggtccgccaggctccagggaaggggctggagtgggtctcaagcattagtggtgacagcgtaacaacatactacgcagactccgtgaagggccggttcaccatctccagagacaattccaagaacacgctgtatctgcaaatgaacagcctgagagccgaggacacggcggtgtactactgcgccaagggccctcctacataccacacaaactactactacatggacgtatggggcaagggtacaactgtcaccgtctcctcaggagggggcggatcaggcggaggtggatcgggagggggtggtagcgacatccagatgacccagtctccatcttccgtgtctgcatctgtaggagacagagtcaccatcacttgtcgggcgagtcagggtattagcagctggttagcctggtatcagcagaaaccagggaaagcccctaagctcctgatctatgctgcatccagtttgcaaagtggggtcccatcaaggttcagcggcagtggatctgggacagatttcactctcaccatcagcagcctgcagcctgaagattttgcaacttattactgtcagcaaacaaatagtttcccttacacttttggcggagggaccaaggttgagatcaaacaccatcatcatcaccat

SEQ ID NO: 664 - DNA, 1215 bp, synthetic construct
  source 1..1215: mol_type = other DNA
cccgctgctctgctgcctgcccggggtaccaacatggcccagaagcgtcctgcctgcaccctgaagcctgagtgtgtccagcagctgctggtttgctcccaggaggccaagaagtcagcctactgcccctacagtcactttcctgtgggggctgccctgctcacccaggaggggagaatcttcaaagggtgcaacatagaaaatgcctgctacccgctgggcatctgtgctgaacggaccgctatccagaaggccgtctcagaagggtacaaggatttcagggcaattgctatcgccagtgacatgcaagatgattttatctctccatgtggggcctgcaggcaagtcatgagagagtttggcaccaactggcccgtgtacatgaccaagccggatggtacgtatattggtggaggcggttcgggtggagggggatctggtggcggaggtagcggtggcgggggatcagaggtgcagctggtggagtctgggggaggcttggtccagcctggagggtccctgagactctcctgtgcagcctctggattcaccttcagtgaccactacatggactgggtccgccaggctccagggaaggggctggagtgggttggccgtactagaaacaaagctagtagttacaccacagaatacgccgcgtctgtgaaaggcagattcaccatctcaagagatgattcaaagaactcactgtatctgcaaatgaacagcctgaaaaccgaggacacggcggtgtactactgcgccagagagcctaaatactggatcgacttcgacctatgggggagaggtaccttggtcaccgtctcctcaggagggggcggatcaggcggaggtggatcgggagggggtggtagcgacatccagatgacccagtctccatcctccctgtctgcatctgtaggagacagagtcaccatcacttgccgggcaagtcagagcattagcagctatttaaattggtatcagcagaaaccagggaaagcccctaagctcctgatctatgctgcatccagtttgcaaagtggggtcccatcaaggttcagtggcagtggatctgggacagatttcactctcaccatcagcagtctgcaacctgaagattttgcaacttactactgtcagcaaagctacatcgccccttacacttttggcggagggaccaaggttgagatcaaacaccatcatcatcaccat

SEQ ID NO: 665 - DNA, 1188 bp, synthetic construct
  source 1..1188: mol_type = other DNA
cccgctgctctgctgcctgcccggggtaccaacatggcccagaagcgtcctgcctgcaccctgaagcctgagtgtgtccagcagctgctggtttgctcccaggaggccaagaagtcagcctactgcccctacagtcactttcctgtgggggctgccctgctcacccaggaggggagaatcttcaaagggtgcaacatagaaaatgcctgctacccgctgggcatctgtgctgaacggaccgctatccagaaggccgtctcagaagggtacaaggatttcagggcaattgctatcgccagtgacatgcaagatgattttatctctccatgtggggcctgcaggcaagtcatgagagagtttggcaccaactggcccgtgtacatgaccaagccggatggtacgtatattggtggaggcggttcgggtggagggggatctggtggcggaggtagcggtggcgggggatcagaggtgcagctggtggagtctgggggaggcttggtacagccagggcggtccctgagactctcctgtacagcttctggattcaccttcagtgaccacgacatgaactgggtccgccaggctccagggaaggggctggagtgggttggccgtactagaaacgccgctggaagttacaccacagaatacgccgcgtctgtgaaaggcagattcaccatctcaagagatgattcaaagaactcactgtatctgcaaatgaacagcctgaaaaccgaggacacggcggtgtactactgcgccagagagcctaaatactggatcgacttcgacctatgggggggagggggcggatcaggcggaggtggatcgggagggggtggtagcgacatccagatgacccagtctccatcctccctgtctgcatctgtaggagacagagtcaccatcacttgccgggcaagtcagagcattagcagctatttaaattggtatcagcagaaaccagggaaagcccctaagctcctgatctatgctgcatccagtttgcaaagtggggtcccatcaaggttcagtggcagtggatctgggacagatttcactctcaccatcagcagtctgcaacctgaagattttgcaacttactactgtcagcaaagctacatcgccccttacacttttggcggagggaccaaggttgagatcaaacaccatcatcatcaccat

SEQ ID NO: 666 - DNA, 1215 bp, synthetic construct
  source 1..1215: mol_type = other DNA
cccgctgctctgctgcctgcccggggtaccaacatggcccagaagcgtcctgcctgcaccctgaagcctgagtgtgtccagcagctgctggtttgctcccaggaggccaagaagtcagcctactgcccctacagtcactttcctgtgggggctgccctgctcacccaggaggggagaatcttcaaagggtgcaacatagaaaatgcctgctacccgctgggcatctgtgctgaacggaccgctatccagaaggccgtctcagaagggtacaaggatttcagggcaattgctatcgccagtgacatgcaagatgattttatctctccatgtggggcctgcaggcaagtcatgagagagtttggcaccaactggcccgtgtacatgaccaagccggatggtacgtatattggtggaggcggttcgggtggagggggatctggtggcggaggtagcggtggcgggggatcagacatccagatgacccagtctccatcctccctgtctgcatctgtaggagacagagtcaccatcacttgccgggcaagtcagagcattagcagctatttaaattggtatcagcagaaaccagggaaagcccctaagctcctgatctatgctgcatccagtttgcaaagtggggtcccatcaaggttcagtggcagtggatgcggtacagatttcactctcaccatcagcagtctgcaacctgaagattttgcaacttactactgtcagcaaagctacatcgccccttacacttttggcggagggaccaaggttgagatcaaaggagggggcggatcaggcggaggtggatcgggagggggtggtagcgaggtgcagctggtggagtctgggggaggcttggtccagcctggagggtccctgagactctcctgtgcagcctctggattcaccttcgtagaccacgacatggactgggtccgccaggctccagggaaggggctggagtgggttggccgtactagaaacaaactaggaagttacaccacagaatacgccgcgtctgtgaaaggcagattcaccatctcaagagatgattcaaagaactcactgtatctgcaaatgaacagcctgaaaaccgaggacacggcggtgtactactgcgccagagagcctaaatactggatcgacttcgacctatgggggagaggtaccttggtcaccgtctcctcacaccatcatcatcaccat

SEQ ID NO: 667 - DNA, 1236 bp, synthetic construct
  source 1..1236: mol_type = other DNA
cccgctgctctgctgcctgcccggggtaccaacatggcccagaagcgtcctgcctgcaccctgaagcctgagtgtgtccagcagctgctggtttgctcccaggaggccaagaagtcagcctactgcccctacagtcactttcctgtgggggctgccctgctcacccaggaggggagaatcttcaaagggtgcaacatagaaaatgcctgctacccgctgggcatctgtgctgaacggaccgctatccagaaggccgtctcagaagggtacaaggatttcagggcaattgctatcgccagtgacatgcaagatgattttatctctccatgtggggcctgcaggcaagtcatgagagagtttggcaccaactggcccgtgtacatgaccaagccggatggtacgtatattggtggaggcggttcgggtggagggggatctggtggcggaggtagcggtggcgggggatcaggtggcgggggatcagaggtgcagctgttggagtctgggggaggcttggtacagcctggggggtccctgagactctcctgtgcagcctctggattcacctttagcaattatgccatgagctgggtccgccaggctccagggaaggggctggagtgggtctcagctattagtggtagtggtggtagcacatactacgcagactccgtgaagggccggttcaccatctccagagacaattccaagaacacgctgtatctgcaaatgaacagcctgagagccgaggacacggcggtgtactactgcgccaagggccctcctacataccacacaaactactactacatggacgtatggggcaagggtacaactgtcaccgtctcctcaggagggggcggatcaggcggaggtggatcgggagggggtggtagcgacatccagatgacccagtctccatcttccgtgtctgcatctgtaggagacagagtcaccatcacttgtcgggcgagtcagggtattagcagctggttagcctggtatcagcagaaaccagggaaagcccctaagctcctgatctatgctgcatccagtttgcaaagtggggtcccatcaaggttcagcggcagtggatctgggacagatttcactctcaccatcagcagcctgcagcctgaagattttgcaacttattactgtcagcaaacaaatagtttcccttacacttttggcggagggaccaaggttgagatcaaacaccatcatcatcaccat

SEQ ID NO: 668 - DNA, 1236 bp, synthetic construct
  source 1..1236: mol_type = other DNA
cccgctgctctgctgcctgcccggggtaccaacatggcccagaagcgtcctgcctgcaccctgaagcctgagtgtgtccagcagctgctggtttgctcccaggaggccaagaagtcagcctactgcccctacagtcactttcctgtgggggctgccctgctcacccaggaggggagaatcttcaaagggtgcaacatagaaaatgcctgctacccgctgggcatctgtgctgaacggaccgctatccagaaggccgtctcagaagggtacaaggatttcagggcaattgctatcgccagtgacatgcaagatgattttatctctccatgtggggcctgcaggcaagtcatgagagagtttggcaccaactggcccgtgtacatgaccaagccggatggtacgtatattggtggaggcggttcgggtggagggggatctggtggcggaggtagcggtggcgggggatcaggtggcgggggatcagaggtgcagctgttggagtctgggggaggcttggtacagcctggggggtccctgagactctcctgtgcagcctctggattcacctttagcagctatgtcatgatctgggtccgccaggctccagggaaggggctggagtgggtctcaagcattagtggtgacagcgtaacaacatactacgcagactccgtgaagggccggttcaccatctccagagacaattccaagaacacgctgtatctgcaaatgaacagcctgagagccgaggacacggcggtgtactactgcgccaagggccctcctacataccacacaaactactactacatggacgtatggggcaagggtacaactgtcaccgtctcctcaggagggggcggatcaggcggaggtggatcgggagggggtggtagcgacatccagatgacccagtctccatcttccgtgtctgcatctgtaggagacagagtcaccatcacttgtcgggcgagtcagggtattagcagctggttagcctggtatcagcagaaaccagggaaagcccctaagctcctgatctatgctgcatccagtttgcaaagtggggtcccatcaaggttcagcggcagtggatctgggacagatttcactctcaccatcagcagcctgcagcctgaagattttgcaacttattactgtcagcaaacaaatagtttcccttacacttttggcggagggaccaaggttgagatcaaacaccatcatcatcaccat

SEQ ID NO: 669 - DNA, 1230 bp, synthetic construct
  source 1..1230: mol_type = other DNA
cccgctgctctgctgcctgcccggggtaccaacatggcccagaagcgtcctgcctgcaccctgaagcctgagtgtgtccagcagctgctggtttgctcccaggaggccaagaagtcagcctactgcccctacagtcactttcctgtgggggctgccctgctcacccaggaggggagaatcttcaaagggtgcaacatagaaaatgcctgctacccgctgggcatctgtgctgaacggaccgctatccagaaggccgtctcagaagggtacaaggatttcagggcaattgctatcgccagtgacatgcaagatgattttatctctccatgtggggcctgcaggcaagtcatgagagagtttggcaccaactggcccgtgtacatgaccaagccggatggtacgtatattggtggaggcggttcgggtggagggggatctggtggcggaggtagcggtggcgggggatcaggtggcgggggatcagaggtgcagctggtggagtctgggggaggcttggtccagcctggagggtccctgagactctcctgtgcagcctctggattcaccttcagtgaccactacatggactgggtccgccaggctccagggaaggggctggagtgggttggccgtactagaaacaaagctagtagttacaccacagaatacgccgcgtctgtgaaaggcagattcaccatctcaagagatgattcaaagaactcactgtatctgcaaatgaacagcctgaaaaccgaggacacggcggtgtactactgcgccagagagcctaaatactggatcgacttcgacctatgggggagaggtaccttggtcaccgtctcctcaggagggggcggatcaggcggaggtggatcgggagggggtggtagcgacatccagatgacccagtctccatcctccctgtctgcatctgtaggagacagagtcaccatcacttgccgggcaagtcagagcattagcagctatttaaattggtatcagcagaaaccagggaaagcccctaagctcctgatctatgctgcatccagtttgcaaagtggggtcccatcaaggttcagtggcagtggatctgggacagatttcactctcaccatcagcagtctgcaacctgaagattttgcaacttactactgtcagcaaagctacatcgccccttacacttttggcggagggaccaaggttgagatcaaacaccatcatcatcaccat

SEQ ID NO: 670 - DNA, 1203 bp, synthetic construct
  source 1..1203: mol_type = other DNA
cccgctgctctgctgcctgcccggggtaccaacatggcccagaagcgtcctgcctgcaccctgaagcctgagtgtgtccagcagctgctggtttgctcccaggaggccaagaagtcagcctactgcccctacagtcactttcctgtgggggctgccctgctcacccaggaggggagaatcttcaaagggtgcaacatagaaaatgcctgctacccgctgggcatctgtgctgaacggaccgctatccagaaggccgtctcagaagggtacaaggatttcagggcaattgctatcgccagtgacatgcaagatgattttatctctccatgtggggcctgcaggcaagtcatgagagagtttggcaccaactggcccgtgtacatgaccaagccggatggtacgtatattggtggaggcggttcgggtggagggggatctggtggcggaggtagcggtggcgggggatcaggtggcgggggatcagaggtgcagctggtggagtctgggggaggcttggtacagccagggcggtccctgagactctcctgtacagcttctggattcaccttcagtgaccacgacatgaactgggtccgccaggctccagggaaggggctggagtgggttggccgtactagaaacgccgctggaagttacaccacagaatacgccgcgtctgtgaaaggcagattcaccatctcaagagatgattcaaagaactcactgtatctgcaaatgaacagcctgaaaaccgaggacacggcggtgtactactgcgccagagagcctaaatactggatcgacttcgacctatgggggggagggggcggatcaggcggaggtggatcgggagggggtggtagcgacatccagatgacccagtctccatcctccctgtctgcatctgtaggagacagagtcaccatcacttgccgggcaagtcagagcattagcagctatttaaattggtatcagcagaaaccagggaaagcccctaagctcctgatctatgctgcatccagtttgcaaagtggggtcccatcaaggttcagtggcagtggatctgggacagatttcactctcaccatcagcagtctgcaacctgaagattttgcaacttactactgtcagcaaagctacatcgccccttacacttttggcggagggaccaaggttgagatcaaacaccatcatcatcaccat

SEQ ID NO: 671 - DNA, 1230 bp, synthetic construct
  source 1..1230: mol_type = other DNA
cccgctgctctgctgcctgcccggggtaccaacatggcccagaagcgtcctgcctgcaccctgaagcctgagtgtgtccagcagctgctggtttgctcccaggaggccaagaagtcagcctactgcccctacagtcactttcctgtgggggctgccctgctcacccaggaggggagaatcttcaaagggtgcaacatagaaaatgcctgctacccgctgggcatctgtgctgaacggaccgctatccagaaggccgtctcagaagggtacaaggatttcagggcaattgctatcgccagtgacatgcaagatgattttatctctccatgtggggcctgcaggcaagtcatgagagagtttggcaccaactggcccgtgtacatgaccaagccggatggtacgtatattggtggaggcggttcgggtggagggggatctggtggcggaggtagcggtggcgggggatcaggtggcgggggatcagacatccagatgacccagtctccatcctccctgtctgcatctgtaggagacagagtcaccatcacttgccgggcaagtcagagcattagcagctatttaaattggtatcagcagaaaccagggaaagcccctaagctcctgatctatgctgcatccagtttgcaaagtggggtcccatcaaggttcagtggcagtggatgcggtacagatttcactctcaccatcagcagtctgcaacctgaagattttgcaacttactactgtcagcaaagctacatcgccccttacacttttggcggagggaccaaggttgagatcaaaggagggggcggatcaggcggaggtggatcgggagggggtggtagcgaggtgcagctggtggagtctgggggaggcttggtccagcctggagggtccctgagactctcctgtgcagcctctggattcaccttcgtagaccacgacatggactgggtccgccaggctccagggaaggggctggagtgggttggccgtactagaaacaaactaggaagttacaccacagaatacgccgcgtctgtgaaaggcagattcaccatctcaagagatgattcaaagaactcactgtatctgcaaatgaacagcctgaaaaccgaggacacggcggtgtactactgcgccagagagcctaaatactggatcgacttcgacctatgggggagaggtaccttggtcaccgtctcctcacaccatcatcatcaccat

SEQ ID NO: 672 - DNA, 1251 bp, synthetic construct
  source 1..1251: mol_type = other DNA
cccgctgctctgctgcctgcccggggtaccaacatggcccagaagcgtcctgcctgcaccctgaagcctgagtgtgtccagcagctgctggtttgctcccaggaggccaagaagtcagcctactgcccctacagtcactttcctgtgggggctgccctgctcacccaggaggggagaatcttcaaagggtgcaacatagaaaatgcctgctacccgctgggcatctgtgctgaacggaccgctatccagaaggccgtctcagaagggtacaaggatttcagggcaattgctatcgccagtgacatgcaagatgattttatctctccatgtggggcctgcaggcaagtcatgagagagtttggcaccaactggcccgtgtacatgaccaagccggatggtacgtatattggtggaggcggttcgggtggagggggatctggtggcggaggtagcggtggcgggggatcaggtggcgggggatcaggtggcgggggatcagaggtgcagctgttggagtctgggggaggcttggtacagcctggggggtccctgagactctcctgtgcagcctctggattcacctttagcaattatgccatgagctgggtccgccaggctccagggaaggggctggagtgggtctcagctattagtggtagtggtggtagcacatactacgcagactccgtgaagggccggttcaccatctccagagacaattccaagaacacgctgtatctgcaaatgaacagcctgagagccgaggacacggcggtgtactactgcgccaagggccctcctacataccacacaaactactactacatggacgtatggggcaagggtacaactgtcaccgtctcctcaggagggggcggatcaggcggaggtggatcgggagggggtggtagcgacatccagatgacccagtctccatcttccgtgtctgcatctgtaggagacagagtcaccatcacttgtcgggcgagtcagggtattagcagctggttagcctggtatcagcagaaaccagggaaagcccctaagctcctgatctatgctgcatccagtttgcaaagtggggtcccatcaaggttcagcggcagtggatctgggacagatttcactctcaccatcagcagcctgcagcctgaagattttgcaacttattactgtcagcaaacaaatagtttcccttacacttttggcggagggaccaaggttgagatcaaacaccatcatcatcaccat

SEQ ID NO: 673 - DNA, 1251 bp, synthetic construct
  source 1..1251: mol_type = other DNA
cccgctgctctgctgcctgcccggggtaccaacatggcccagaagcgtcctgcctgcaccctgaagcctgagtgtgtccagcagctgctggtttgctcccaggaggccaagaagtcagcctactgcccctacagtcactttcctgtgggggctgccctgctcacccaggaggggagaatcttcaaagggtgcaacatagaaaatgcctgctacccgctgggcatctgtgctgaacggaccgctatccagaaggccgtctcagaagggtacaaggatttcagggcaattgctatcgccagtgacatgcaagatgattttatctctccatgtggggcctgcaggcaagtcatgagagagtttggcaccaactggcccgtgtacatgaccaagccggatggtacgtatattggtggaggcggttcgggtggagggggatctggtggcggaggtagcggtggcgggggatcaggtggcgggggatcaggtggcgggggatcagaggtgcagctgttggagtctgggggaggcttggtacagcctggggggtccctgagactctcctgtgcagcctctggattcacctttagcagctatgtcatgatctgggtccgccaggctccagggaaggggctggagtgggtctcaagcattagtggtgacagcgtaacaacatactacgcagactccgtgaagggccggttcaccatctccagagacaattccaagaacacgctgtatctgcaaatgaacagcctgagagccgaggacacggcggtgtactactgcgccaagggccctcctacataccacacaaactactactacatggacgtatggggcaagggtacaactgtcaccgtctcctcaggagggggcggatcaggcggaggtggatcgggagggggtggtagcgacatccagatgacccagtctccatcttccgtgtctgcatctgtaggagacagagtcaccatcacttgtcgggcgagtcagggtattagcagctggttagcctggtatcagcagaaaccagggaaagcccctaagctcctgatctatgctgcatccagtttgcaaagtggggtcccatcaaggttcagcggcagtggatctgggacagatttcactctcaccatcagcagcctgcagcctgaagattttgcaacttattactgtcagcaaacaaatagtttcccttacacttttggcggagggaccaaggttgagatcaaacaccatcatcatcaccat

SEQ ID NO: 674 - DNA, 1245 bp, synthetic construct
  source 1..1245: mol_type = other DNA
cccgctgctctgctgcctgcccggggtaccaacatggcccagaagcgtcctgcctgcaccctgaagcctgagtgtgtccagcagctgctggtttgctcccaggaggccaagaagtcagcctactgcccctacagtcactttcctgtgggggctgccctgctcacccaggaggggagaatcttcaaagggtgcaacatagaaaatgcctgctacccgctgggcatctgtgctgaacggaccgctatccagaaggccgtctcagaagggtacaaggatttcagggcaattgctatcgccagtgacatgcaagatgattttatctctccatgtggggcctgcaggcaagtcatgagagagtttggcaccaactggcccgtgtacatgaccaagccggatggtacgtatattggtggaggcggttcgggtggagggggatctggtggcggaggtagcggtggcgggggatcaggtggcgggggatcaggtggcgggggatcagaggtgcagctggtggagtctgggggaggcttggtccagcctggagggtccctgagactctcctgtgcagcctctggattcaccttcagtgaccactacatggactgggtccgccaggctccagggaaggggctggagtgggttggccgtactagaaacaaagctagtagttacaccacagaatacgccgcgtctgtgaaaggcagattcaccatctcaagagatgattcaaagaactcactgtatctgcaaatgaacagcctgaaaaccgaggacacggcggtgtactactgcgccagagagcctaaatactggatcgacttcgacctatgggggagaggtaccttggtcaccgtctcctcaggagggggcggatcaggcggaggtggatcgggagggggtggtagcgacatccagatgacccagtctccatcctccctgtctgcatctgtaggagacagagtcaccatcacttgccgggcaagtcagagcattagcagctatttaaattggtatcagcagaaaccagggaaagcccctaagctcctgatctatgctgcatccagtttgcaaagtggggtcccatcaaggttcagtggcagtggatctgggacagatttcactctcaccatcagcagtctgcaacctgaagattttgcaacttactactgtcagcaaagctacatcgccccttacacttttggcggagggaccaaggttgagatcaaacaccatcatcatcaccat

SEQ ID NO: 675 - DNA, 1218 bp, synthetic construct
  source 1..1218: mol_type = other DNA
cccgctgctctgctgcctgcccggggtaccaacatggcccagaagcgtcctgcctgcaccctgaagcctgagtgtgtccagcagctgctggtttgctcccaggaggccaagaagtcagcctactgcccctacagtcactttcctgtgggggctgccctgctcacccaggaggggagaatcttcaaagggtgcaacatagaaaatgcctgctacccgctgggcatctgtgctgaacggaccgctatccagaaggccgtctcagaagggtacaaggatttcagggcaattgctatcgccagtgacatgcaagatgattttatctctccatgtggggcctgcaggcaagtcatgagagagtttggcaccaactggcccgtgtacatgaccaagccggatggtacgtatattggtggaggcggttcgggtggagggggatctggtggcggaggtagcggtggcgggggatcaggtggcgggggatcaggtggcgggggatcagaggtgcagctggtggagtctgggggaggcttggtacagccagggcggtccctgagactctcctgtacagcttctggattcaccttcagtgaccacgacatgaactgggtccgccaggctccagggaaggggctggagtgggttggccgtactagaaacgccgctggaagttacaccacagaatacgccgcgtctgtgaaaggcagattcaccatctcaagagatgattcaaagaactcactgtatctgcaaatgaacagcctgaaaaccgaggacacggcggtgtactactgcgccagagagcctaaatactggatcgacttcgacctatgggggggagggggcggatcaggcggaggtggatcgggagggggtggtagcgacatccagatgacccagtctccatcctccctgtctgcatctgtaggagacagagtcaccatcacttgccgggcaagtcagagcattagcagctatttaaattggtatcagcagaaaccagggaaagcccctaagctcctgatctatgctgcatccagtttgcaaagtggggtcccatcaaggttcagtggcagtggatctgggacagatttcactctcaccatcagcagtctgcaacctgaagattttgcaacttactactgtcagcaaagctacatcgccccttacacttttggcggagggaccaaggttgagatcaaacaccatcatcatcaccat

SEQ ID NO: 676 - DNA, 1245 bp, synthetic construct
  source 1..1245: mol_type = other DNA
cccgctgctctgctgcctgcccggggtaccaacatggcccagaagcgtcctgcctgcaccctgaagcctgagtgtgtccagcagctgctggtttgctcccaggaggccaagaagtcagcctactgcccctacagtcactttcctgtgggggctgccctgctcacccaggaggggagaatcttcaaagggtgcaacatagaaaatgcctgctacccgctgggcatctgtgctgaacggaccgctatccagaaggccgtctcagaagggtacaaggatttcagggcaattgctatcgccagtgacatgcaagatgattttatctctccatgtggggcctgcaggcaagtcatgagagagtttggcaccaactggcccgtgtacatgaccaagccggatggtacgtatattggtggaggcggttcgggtggagggggatctggtggcggaggtagcggtggcgggggatcaggtggcgggggatcaggtggcgggggatcagacatccagatgacccagtctccatcctccctgtctgcatctgtaggagacagagtcaccatcacttgccgggcaagtcagagcattagcagctatttaaattggtatcagcagaaaccagggaaagcccctaagctcctgatctatgctgcatccagtttgcaaagtggggtcccatcaaggttcagtggcagtggatgcggtacagatttcactctcaccatcagcagtctgcaacctgaagattttgcaacttactactgtcagcaaagctacatcgccccttacacttttggcggagggaccaaggttgagatcaaaggagggggcggatcaggcggaggtggatcgggagggggtggtagcgaggtgcagctggtggagtctgggggaggcttggtccagcctggagggtccctgagactctcctgtgcagcctctggattcaccttcgtagaccacgacatggactgggtccgccaggctccagggaaggggctggagtgggttggccgtactagaaacaaactaggaagttacaccacagaatacgccgcgtctgtgaaaggcagattcaccatctcaagagatgattcaaagaactcactgtatctgcaaatgaacagcctgaaaaccgaggacacggcggtgtactactgcgccagagagcctaaatactggatcgacttcgacctatgggggagaggtaccttggtcaccgtctcctcacaccatcatcatcaccat

SEQ ID NO: 677 - DNA, 1266 bp, synthetic construct
  source 1..1266: mol_type = other DNA
cccgctgctctgctgcctgcccggggtaccaacatggcccagaagcgtcctgcctgcaccctgaagcctgagtgtgtccagcagctgctggtttgctcccaggaggccaagaagtcagcctactgcccctacagtcactttcctgtgggggctgccctgctcacccaggaggggagaatcttcaaagggtgcaacatagaaaatgcctgctacccgctgggcatctgtgctgaacggaccgctatccagaaggccgtctcagaagggtacaaggatttcagggcaattgctatcgccagtgacatgcaagatgattttatctctccatgtggggcctgcaggcaagtcatgagagagtttggcaccaactggcccgtgtacatgaccaagccggatggtacgtatattggtggaggcggttcgggtggagggggatctggtggcggaggtagcggtggcgggggatcaggtggcgggggatcaggtggcgggggatcaggtggcgggggatcagaggtgcagctgttggagtctgggggaggcttggtacagcctggggggtccctgagactctcctgtgcagcctctggattcacctttagcaattatgccatgagctgggtccgccaggctccagggaaggggctggagtgggtctcagctattagtggtagtggtggtagcacatactacgcagactccgtgaagggccggttcaccatctccagagacaattccaagaacacgctgtatctgcaaatgaacagcctgagagccgaggacacggcggtgtactactgcgccaagggccctcctacataccacacaaactactactacatggacgtatggggcaagggtacaactgtcaccgtctcctcaggagggggcggatcaggcggaggtggatcgggagggggtggtagcgacatccagatgacccagtctccatcttccgtgtctgcatctgtaggagacagagtcaccatcacttgtcgggcgagtcagggtattagcagctggttagcctggtatcagcagaaaccagggaaagcccctaagctcctgatctatgctgcatccagtttgcaaagtggggtcccatcaaggttcagcggcagtggatctgggacagatttcactctcaccatcagcagcctgcagcctgaagattttgcaacttattactgtcagcaaacaaatagtttcccttacacttttggcggagggaccaaggttgagatcaaacaccatcatcatcaccat

SEQ ID NO: 678 - DNA, 1266 bp, synthetic construct
  source 1..1266: mol_type = other DNA
cccgctgctctgctgcctgcccggggtaccaacatggcccagaagcgtcctgcctgcaccctgaagcctgagtgtgtccagcagctgctggtttgctcccaggaggccaagaagtcagcctactgcccctacagtcactttcctgtgggggctgccctgctcacccaggaggggagaatcttcaaagggtgcaacatagaaaatgcctgctacccgctgggcatctgtgctgaacggaccgctatccagaaggccgtctcagaagggtacaaggatttcagggcaattgctatcgccagtgacatgcaagatgattttatctctccatgtggggcctgcaggcaagtcatgagagagtttggcaccaactggcccgtgtacatgaccaagccggatggtacgtatattggtggaggcggttcgggtggagggggatctggtggcggaggtagcggtggcgggggatcaggtggcgggggatcaggtggcgggggatcaggtggcgggggatcagaggtgcagctgttggagtctgggggaggcttggtacagcctggggggtccctgagactctcctgtgcagcctctggattcacctttagcagctatgtcatgatctgggtccgccaggctccagggaaggggctggagtgggtctcaagcattagtggtgacagcgtaacaacatactacgcagactccgtgaagggccggttcaccatctccagagacaattccaagaacacgctgtatctgcaaatgaacagcctgagagccgaggacacggcggtgtactactgcgccaagggccctcctacataccacacaaactactactacatggacgtatggggcaagggtacaactgtcaccgtctcctcaggagggggcggatcaggcggaggtggatcgggagggggtggtagcgacatccagatgacccagtctccatcttccgtgtctgcatctgtaggagacagagtcaccatcacttgtcgggcgagtcagggtattagcagctggttagcctggtatcagcagaaaccagggaaagcccctaagctcctgatctatgctgcatccagtttgcaaagtggggtcccatcaaggttcagcggcagtggatctgggacagatttcactctcaccatcagcagcctgcagcctgaagattttgcaacttattactgtcagcaaacaaatagtttcccttacacttttggcggagggaccaaggttgagatcaaacaccatcatcatcaccat

SEQ ID NO: 679 - DNA, 1260 bp, synthetic construct
  source 1..1260: mol_type = other DNA
cccgctgctctgctgcctgcccggggtaccaacatggcccagaagcgtcctgcctgcaccctgaagcctgagtgtgtccagcagctgctggtttgctcccaggaggccaagaagtcagcctactgcccctacagtcactttcctgtgggggctgccctgctcacccaggaggggagaatcttcaaagggtgcaacatagaaaatgcctgctacccgctgggcatctgtgctgaacggaccgctatccagaaggccgtctcagaagggtacaaggatttcagggcaattgctatcgccagtgacatgcaagatgattttatctctccatgtggggcctgcaggcaagtcatgagagagtttggcaccaactggcccgtgtacatgaccaagccggatggtacgtatattggtggaggcggttcgggtggagggggatctggtggcggaggtagcggtggcgggggatcaggtggcgggggatcaggtggcgggggatcaggtggcgggggatcagaggtgcagctggtggagtctgggggaggcttggtccagcctggagggtccctgagactctcctgtgcagcctctggattcaccttcagtgaccactacatggactgggtccgccaggctccagggaaggggctggagtgggttggccgtactagaaacaaagctagtagttacaccacagaatacgccgcgtctgtgaaaggcagattcaccatctcaagagatgattcaaagaactcactgtatctgcaaatgaacagcctgaaaaccgaggacacggcggtgtactactgcgccagagagcctaaatactggatcgacttcgacctatgggggagaggtaccttggtcaccgtctcctcaggagggggcggatcaggcggaggtggatcgggagggggtggtagcgacatccagatgacccagtctccatcctccctgtctgcatctgtaggagacagagtcaccatcacttgccgggcaagtcagagcattagcagctatttaaattggtatcagcagaaaccagggaaagcccctaagctcctgatctatgctgcatccagtttgcaaagtggggtcccatcaaggttcagtggcagtggatctgggacagatttcactctcaccatcagcagtctgcaacctgaagattttgcaacttactactgtcagcaaagctacatcgccccttacacttttggcggagggaccaaggttgagatcaaacaccatcatcatcaccat

SEQ ID NO: 680 - DNA, 1233 bp, synthetic construct
  source 1..1233: mol_type = other DNA
cccgctgctctgctgcctgcccggggtaccaacatggcccagaagcgtcctgcctgcaccctgaagcctgagtgtgtccagcagctgctggtttgctcccaggaggccaagaagtcagcctactgcccctacagtcactttcctgtgggggctgccctgctcacccaggaggggagaatcttcaaagggtgcaacatagaaaatgcctgctacccgctgggcatctgtgctgaacggaccgctatccagaaggccgtctcagaagggtacaaggatttcagggcaattgctatcgccagtgacatgcaagatgattttatctctccatgtggggcctgcaggcaagtcatgagagagtttggcaccaactggcccgtgtacatgaccaagccggatggtacgtatattggtggaggcggttcgggtggagggggatctggtggcggaggtagcggtggcgggggatcaggtggcgggggatcaggtggcgggggatcaggtggcgggggatcagaggtgcagctggtggagtctgggggaggcttggtacagccagggcggtccctgagactctcctgtacagcttctggattcaccttcagtgaccacgacatgaactgggtccgccaggctccagggaaggggctggagtgggttggccgtactagaaacgccgctggaagttacaccacagaatacgccgcgtctgtgaaaggcagattcaccatctcaagagatgattcaaagaactcactgtatctgcaaatgaacagcctgaaaaccgaggacacggcggtgtactactgcgccagagagcctaaatactggatcgacttcgacctatgggggggagggggcggatcaggcggaggtggatcgggagggggtggtagcgacatccagatgacccagtctccatcctccctgtctgcatctgtaggagacagagtcaccatcacttgccgggcaagtcagagcattagcagctatttaaattggtatcagcagaaaccagggaaagcccctaagctcctgatctatgctgcatccagtttgcaaagtggggtcccatcaaggttcagtggcagtggatctgggacagatttcactctcaccatcagcagtctgcaacctgaagattttgcaacttactactgtcagcaaagctacatcgccccttacacttttggcggagggaccaaggttgagatcaaacaccatcatcatcaccat

SEQ ID NO: 681 - DNA, 1260 bp, synthetic construct
  source 1..1260: mol_type = other DNA
cccgctgctctgctgcctgcccggggtaccaacatggcccagaagcgtcctgcctgcaccctgaagcctgagtgtgtccagcagctgctggtttgctcccaggaggccaagaagtcagcctactgcccctacagtcactttcctgtgggggctgccctgctcacccaggaggggagaatcttcaaagggtgcaacatagaaaatgcctgctacccgctgggcatctgtgctgaacggaccgctatccagaaggccgtctcagaagggtacaaggatttcagggcaattgctatcgccagtgacatgcaagatgattttatctctccatgtggggcctgcaggcaagtcatgagagagtttggcaccaactggcccgtgtacatgaccaagccggatggtacgtatattggtggaggcggttcgggtggagggggatctggtggcggaggtagcggtggcgggggatcaggtggcgggggatcaggtggcgggggatcaggtggcgggggatcagacatccagatgacccagtctccatcctccctgtctgcatctgtaggagacagagtcaccatcacttgccgggcaagtcagagcattagcagctatttaaattggtatcagcagaaaccagggaaagcccctaagctcctgatctatgctgcatccagtttgcaaagtggggtcccatcaaggttcagtggcagtggatgcggtacagatttcactctcaccatcagcagtctgcaacctgaagattttgcaacttactactgtcagcaaagctacatcgccccttacacttttggcggagggaccaaggttgagatcaaaggagggggcggatcaggcggaggtggatcgggagggggtggtagcgaggtgcagctggtggagtctgggggaggcttggtccagcctggagggtccctgagactctcctgtgcagcctctggattcaccttcgtagaccacgacatggactgggtccgccaggctccagggaaggggctggagtgggttggccgtactagaaacaaactaggaagttacaccacagaatacgccgcgtctgtgaaaggcagattcaccatctcaagagatgattcaaagaactcactgtatctgcaaatgaacagcctgaaaaccgaggacacggcggtgtactactgcgccagagagcctaaatactggatcgacttcgacctatgggggagaggtaccttggtcaccgtctcctcacaccatcatcatcaccat

SEQ ID NO: 682 - DNA, 1281 bp, synthetic construct
  source 1..1281: mol_type = other DNA
cccgctgctctgctgcctgcccggggtaccaacatggcccagaagcgtcctgcctgcaccctgaagcctgagtgtgtccagcagctgctggtttgctcccaggaggccaagaagtcagcctactgcccctacagtcactttcctgtgggggctgccctgctcacccaggaggggagaatcttcaaagggtgcaacatagaaaatgcctgctacccgctgggcatctgtgctgaacggaccgctatccagaaggccgtctcagaagggtacaaggatttcagggcaattgctatcgccagtgacatgcaagatgattttatctctccatgtggggcctgcaggcaagtcatgagagagtttggcaccaactggcccgtgtacatgaccaagccggatggtacgtatattggtggaggcggttcgggtggagggggatctggtggcggaggtagcggtggcgggggatcaggtggcgggggatcaggtggcgggggatcaggtggcgggggatcaggtggcgggggatcagaggtgcagctgttggagtctgggggaggcttggtacagcctggggggtccctgagactctcctgtgcagcctctggattcacctttagcaattatgccatgagctgggtccgccaggctccagggaaggggctggagtgggtctcagctattagtggtagtggtggtagcacatactacgcagactccgtgaagggccggttcaccatctccagagacaattccaagaacacgctgtatctgcaaatgaacagcctgagagccgaggacacggcggtgtactactgcgccaagggccctcctacataccacacaaactactactacatggacgtatggggcaagggtacaactgtcaccgtctcctcaggagggggcggatcaggcggaggtggatcgggagggggtggtagcgacatccagatgacccagtctccatcttccgtgtctgcatctgtaggagacagagtcaccatcacttgtcgggcgagtcagggtattagcagctggttagcctggtatcagcagaaaccagggaaagcccctaagctcctgatctatgctgcatccagtttgcaaagtggggtcccatcaaggttcagcggcagtggatctgggacagatttcactctcaccatcagcagcctgcagcctgaagattttgcaacttattactgtcagcaaacaaatagtttcccttacacttttggcggagggaccaaggttgagatcaaacaccatcatcatcaccat

SEQ ID NO: 683 - DNA, 1281 bp, synthetic construct
  source 1..1281: mol_type = other DNA
cccgctgctctgctgcctgcccggggtaccaacatggcccagaagcgtcctgcctgcaccctgaagcctgagtgtgtccagcagctgctggtttgctcccaggaggccaagaagtcagcctactgcccctacagtcactttcctgtgggggctgccctgctcacccaggaggggagaatcttcaaagggtgcaacatagaaaatgcctgctacccgctgggcatctgtgctgaacggaccgctatccagaaggccgtctcagaagggtacaaggatttcagggcaattgctatcgccagtgacatgcaagatgattttatctctccatgtggggcctgcaggcaagtcatgagagagtttggcaccaactggcccgtgtacatgaccaagccggatggtacgtatattggtggaggcggttcgggtggagggggatctggtggcggaggtagcggtggcgggggatcaggtggcgggggatcaggtggcgggggatcaggtggcgggggatcaggtggcgggggatcagaggtgcagctgttggagtctgggggaggcttggtacagcctggggggtccctgagactctcctgtgcagcctctggattcacctttagcagctatgtcatgatctgggtccgccaggctccagggaaggggctggagtgggtctcaagcattagtggtgacagcgtaacaacatactacgcagactccgtgaagggccggttcaccatctccagagacaattccaagaacacgctgtatctgcaaatgaacagcctgagagccgaggacacggcggtgtactactgcgccaagggccctcctacataccacacaaactactactacatggacgtatggggcaagggtacaactgtcaccgtctcctcaggagggggcggatcaggcggaggtggatcgggagggggtggtagcgacatccagatgacccagtctccatcttccgtgtctgcatctgtaggagacagagtcaccatcacttgtcgggcgagtcagggtattagcagctggttagcctggtatcagcagaaaccagggaaagcccctaagctcctgatctatgctgcatccagtttgcaaagtggggtcccatcaaggttcagcggcagtggatctgggacagatttcactctcaccatcagcagcctgcagcctgaagattttgcaacttattactgtcagcaaacaaatagtttcccttacacttttggcggagggaccaaggttgagatcaaacaccatcatcatcaccat

SEQ ID NO: 684 - DNA, 1275 bp, synthetic construct
  source 1..1275: mol_type = other DNA
cccgctgctctgctgcctgcccggggtaccaacatggcccagaagcgtcctgcctgcaccctgaagcctgagtgtgtccagcagctgctggtttgctcccaggaggccaagaagtcagcctactgcccctacagtcactttcctgtgggggctgccctgctcacccaggaggggagaatcttcaaagggtgcaacatagaaaatgcctgctacccgctgggcatctgtgctgaacggaccgctatccagaaggccgtctcagaagggtacaaggatttcagggcaattgctatcgccagtgacatgcaagatgattttatctctccatgtggggcctgcaggcaagtcatgagagagtttggcaccaactggcccgtgtacatgaccaagccggatggtacgtatattggtggaggcggttcgggtggagggggatctggtggcggaggtagcggtggcgggggatcaggtggcgggggatcaggtggcgggggatcaggtggcgggggatcaggtggcgggggatcagaggtgcagctggtggagtctgggggaggcttggtccagcctggagggtccctgagactctcctgtgcagcctctggattcaccttcagtgaccactacatggactgggtccgccaggctccagggaaggggctggagtgggttggccgtactagaaacaaagctagtagttacaccacagaatacgccgcgtctgtgaaaggcagattcaccatctcaagagatgattcaaagaactcactgtatctgcaaatgaacagcctgaaaaccgaggacacggcggtgtactactgcgccagagagcctaaatactggatcgacttcgacctatgggggagaggtaccttggtcaccgtctcctcaggagggggcggatcaggcggaggtggatcgggagggggtggtagcgacatccagatgacccagtctccatcctccctgtctgcatctgtaggagacagagtcaccatcacttgccgggcaagtcagagcattagcagctatttaaattggtatcagcagaaaccagggaaagcccctaagctcctgatctatgctgcatccagtttgcaaagtggggtcccatcaaggttcagtggcagtggatctgggacagatttcactctcaccatcagcagtctgcaacctgaagattttgcaacttactactgtcagcaaagctacatcgccccttacacttttggcggagggaccaaggttgagatcaaacaccatcatcatcaccat

SEQ ID NO: 685 - DNA, 1248 bp, synthetic construct
  source 1..1248: mol_type = other DNA
cccgctgctctgctgcctgcccggggtaccaacatggcccagaagcgtcctgcctgcaccctgaagcctgagtgtgtccagcagctgctggtttgctcccaggaggccaagaagtcagcctactgcccctacagtcactttcctgtgggggctgccctgctcacccaggaggggagaatcttcaaagggtgcaacatagaaaatgcctgctacccgctgggcatctgtgctgaacggaccgctatccagaaggccgtctcagaagggtacaaggatttcagggcaattgctatcgccagtgacatgcaagatgattttatctctccatgtggggcctgcaggcaagtcatgagagagtttggcaccaactggcccgtgtacatgaccaagccggatggtacgtatattggtggaggcggttcgggtggagggggatctggtggcggaggtagcggtggcgggggatcaggtggcgggggatcaggtggcgggggatcaggtggcgggggatcaggtggcgggggatcagaggtgcagctggtggagtctgggggaggcttggtacagccagggcggtccctgagactctcctgtacagcttctggattcaccttcagtgaccacgacatgaactgggtccgccaggctccagggaaggggctggagtgggttggccgtactagaaacgccgctggaagttacaccacagaatacgccgcgtctgtgaaaggcagattcaccatctcaagagatgattcaaagaactcactgtatctgcaaatgaacagcctgaaaaccgaggacacggcggtgtactactgcgccagagagcctaaatactggatcgacttcgacctatgggggggagggggcggatcaggcggaggtggatcgggagggggtggtagcgacatccagatgacccagtctccatcctccctgtctgcatctgtaggagacagagtcaccatcacttgccgggcaagtcagagcattagcagctatttaaattggtatcagcagaaaccagggaaagcccctaagctcctgatctatgctgcatccagtttgcaaagtggggtcccatcaaggttcagtggcagtggatctgggacagatttcactctcaccatcagcagtctgcaacctgaagattttgcaacttactactgtcagcaaagctacatcgccccttacacttttggcggagggaccaaggttgagatcaaacaccatcatcatcaccat

SEQ ID NO: 686 - DNA, 1275 bp, synthetic construct
  source 1..1275: mol_type = other DNA
cccgctgctctgctgcctgcccggggtaccaacatggcccagaagcgtcctgcctgcaccctgaagcctgagtgtgtccagcagctgctggtttgctcccaggaggccaagaagtcagcctactgcccctacagtcactttcctgtgggggctgccctgctcacccaggaggggagaatcttcaaagggtgcaacatagaaaatgcctgctacccgctgggcatctgtgctgaacggaccgctatccagaaggccgtctcagaagggtacaaggatttcagggcaattgctatcgccagtgacatgcaagatgattttatctctccatgtggggcctgcaggcaagtcatgagagagtttggcaccaactggcccgtgtacatgaccaagccggatggtacgtatattggtggaggcggttcgggtggagggggatctggtggcggaggtagcggtggcgggggatcaggtggcgggggatcaggtggcgggggatcaggtggcgggggatcaggtggcgggggatcagacatccagatgacccagtctccatcctccctgtctgcatctgtaggagacagagtcaccatcacttgccgggcaagtcagagcattagcagctatttaaattggtatcagcagaaaccagggaaagcccctaagctcctgatctatgctgcatccagtttgcaaagtggggtcccatcaaggttcagtggcagtggatgcggtacagatttcactctcaccatcagcagtctgcaacctgaagattttgcaacttactactgtcagcaaagctacatcgccccttacacttttggcggagggaccaaggttgagatcaaaggagggggcggatcaggcggaggtggatcgggagggggtggtagcgaggtgcagctggtggagtctgggggaggcttggtccagcctggagggtccctgagactctcctgtgcagcctctggattcaccttcgtagaccacgacatggactgggtccgccaggctccagggaaggggctggagtgggttggccgtactagaaacaaactaggaagttacaccacagaatacgccgcgtctgtgaaaggcagattcaccatctcaagagatgattcaaagaactcactgtatctgcaaatgaacagcctgaaaaccgaggacacggcggtgtactactgcgccagagagcctaaatactggatcgacttcgacctatgggggagaggtaccttggtcaccgtctcctcacaccatcatcatcaccat

SEQ ID NO: 687 - DNA, 1296 bp, synthetic construct
  source 1..1296: mol_type = other DNA
cccgctgctctgctgcctgcccggggtaccaacatggcccagaagcgtcctgcctgcaccctgaagcctgagtgtgtccagcagctgctggtttgctcccaggaggccaagaagtcagcctactgcccctacagtcactttcctgtgggggctgccctgctcacccaggaggggagaatcttcaaagggtgcaacatagaaaatgcctgctacccgctgggcatctgtgctgaacggaccgctatccagaaggccgtctcagaagggtacaaggatttcagggcaattgctatcgccagtgacatgcaagatgattttatctctccatgtggggcctgcaggcaagtcatgagagagtttggcaccaactggcccgtgtacatgaccaagccggatggtacgtatattggtggaggcggttcgggtggagggggatctggtggcggaggtagcggtggcgggggatcaggtggcgggggatcaggtggcgggggatcaggtggcgggggatcaggtggcgggggatcaggtggcgggggatcagaggtgcagctgttggagtctgggggaggcttggtacagcctggggggtccctgagactctcctgtgcagcctctggattcacctttagcaattatgccatgagctgggtccgccaggctccagggaaggggctggagtgggtctcagctattagtggtagtggtggtagcacatactacgcagactccgtgaagggccggttcaccatctccagagacaattccaagaacacgctgtatctgcaaatgaacagcctgagagccgaggacacggcggtgtactactgcgccaagggccctcctacataccacacaaactactactacatggacgtatggggcaagggtacaactgtcaccgtctcctcaggagggggcggatcaggcggaggtggatcgggagggggtggtagcgacatccagatgacccagtctccatcttccgtgtctgcatctgtaggagacagagtcaccatcacttgtcgggcgagtcagggtattagcagctggttagcctggtatcagcagaaaccagggaaagcccctaagctcctgatctatgctgcatccagtttgcaaagtggggtcccatcaaggttcagcggcagtggatctgggacagatttcactctcaccatcagcagcctgcagcctgaagattttgcaacttattactgtcagcaaacaaatagtttcccttacacttttggcggagggaccaaggttgagatcaaacaccatcatcatcaccat

SEQ ID NO: 688 - DNA, 1296 bp, synthetic construct
  source 1..1296: mol_type = other DNA
cccgctgctctgctgcctgcccggggtaccaacatggcccagaagcgtcctgcctgcaccctgaagcctgagtgtgtccagcagctgctggtttgctcccaggaggccaagaagtcagcctactgcccctacagtcactttcctgtgggggctgccctgctcacccaggaggggagaatcttcaaagggtgcaacatagaaaatgcctgctacccgctgggcatctgtgctgaacggaccgctatccagaaggccgtctcagaagggtacaaggatttcagggcaattgctatcgccagtgacatgcaagatgattttatctctccatgtggggcctgcaggcaagtcatgagagagtttggcaccaactggcccgtgtacatgaccaagccggatggtacgtatattggtggaggcggttcgggtggagggggatctggtggcggaggtagcggtggcgggggatcaggtggcgggggatcaggtggcgggggatcaggtggcgggggatcaggtggcgggggatcaggtggcgggggatcagaggtgcagctgttggagtctgggggaggcttggtacagcctggggggtccctgagactctcctgtgcagcctctggattcacctttagcagctatgtcatgatctgggtccgccaggctccagggaaggggctggagtgggtctcaagcattagtggtgacagcgtaacaacatactacgcagactccgtgaagggccggttcaccatctccagagacaattccaagaacacgctgtatctgcaaatgaacagcctgagagccgaggacacggcggtgtactactgcgccaagggccctcctacataccacacaaactactactacatggacgtatggggcaagggtacaactgtcaccgtctcctcaggagggggcggatcaggcggaggtggatcgggagggggtggtagcgacatccagatgacccagtctccatcttccgtgtctgcatctgtaggagacagagtcaccatcacttgtcgggcgagtcagggtattagcagctggttagcctggtatcagcagaaaccagggaaagcccctaagctcctgatctatgctgcatccagtttgcaaagtggggtcccatcaaggttcagcggcagtggatctgggacagatttcactctcaccatcagcagcctgcagcctgaagattttgcaacttattactgtcagcaaacaaatagtttcccttacacttttggcggagggaccaaggttgagatcaaacaccatcatcatcaccat

SEQ ID NO: 689 - DNA, 1290 bp, synthetic construct
  source 1..1290: mol_type = other DNA
cccgctgctctgctgcctgcccggggtaccaacatggcccagaagcgtcctgcctgcaccctgaagcctgagtgtgtccagcagctgctggtttgctcccaggaggccaagaagtcagcctactgcccctacagtcactttcctgtgggggctgccctgctcacccaggaggggagaatcttcaaagggtgcaacatagaaaatgcctgctacccgctgggcatctgtgctgaacggaccgctatccagaaggccgtctcagaagggtacaaggatttcagggcaattgctatcgccagtgacatgcaagatgattttatctctccatgtggggcctgcaggcaagtcatgagagagtttggcaccaactggcccgtgtacatgaccaagccggatggtacgtatattggtggaggcggttcgggtggagggggatctggtggcggaggtagcggtggcgggggatcaggtggcgggggatcaggtggcgggggatcaggtggcgggggatcaggtggcgggggatcaggtggcgggggatcagaggtgcagctggtggagtctgggggaggcttggtccagcctggagggtccctgagactctcctgtgcagcctctggattcaccttcagtgaccactacatggactgggtccgccaggctccagggaaggggctggagtgggttggccgtactagaaacaaagctagtagttacaccacagaatacgccgcgtctgtgaaaggcagattcaccatctcaagagatgattcaaagaactcactgtatctgcaaatgaacagcctgaaaaccgaggacacggcggtgtactactgcgccagagagcctaaatactggatcgacttcgacctatgggggagaggtaccttggtcaccgtctcctcaggagggggcggatcaggcggaggtggatcgggagggggtggtagcgacatccagatgacccagtctccatcctccctgtctgcatctgtaggagacagagtcaccatcacttgccgggcaagtcagagcattagcagctatttaaattggtatcagcagaaaccagggaaagcccctaagctcctgatctatgctgcatccagtttgcaaagtggggtcccatcaaggttcagtggcagtggatctgggacagatttcactctcaccatcagcagtctgcaacctgaagattttgcaacttactactgtcagcaaagctacatcgccccttacacttttggcggagggaccaaggttgagatcaaacaccatcatcatcaccat

SEQ ID NO: 690 - DNA, 1263 bp, synthetic construct
  source 1..1263: mol_type = other DNA
cccgctgctctgctgcctgcccggggtaccaacatggcccagaagcgtcctgcctgcaccctgaagcctgagtgtgtccagcagctgctggtttgctcccaggaggccaagaagtcagcctactgcccctacagtcactttcctgtgggggctgccctgctcacccaggaggggagaatcttcaaagggtgcaacatagaaaatgcctgctacccgctgggcatctgtgctgaacggaccgctatccagaaggccgtctcagaagggtacaaggatttcagggcaattgctatcgccagtgacatgcaagatgattttatctctccatgtggggcctgcaggcaagtcatgagagagtttggcaccaactggcccgtgtacatgaccaagccggatggtacgtatattggtggaggcggttcgggtggagggggatctggtggcggaggtagcggtggcgggggatcaggtggcgggggatcaggtggcgggggatcaggtggcgggggatcaggtggcgggggatcaggtggcgggggatcagaggtgcagctggtggagtctgggggaggcttggtacagccagggcggtccctgagactctcctgtacagcttctggattcaccttcagtgaccacgacatgaactgggtccgccaggctccagggaaggggctggagtgggttggccgtactagaaacgccgctggaagttacaccacagaatacgccgcgtctgtgaaaggcagattcaccatctcaagagatgattcaaagaactcactgtatctgcaaatgaacagcctgaaaaccgaggacacggcggtgtactactgcgccagagagcctaaatactggatcgacttcgacctatgggggggagggggcggatcaggcggaggtggatcgggagggggtggtagcgacatccagatgacccagtctccatcctccctgtctgcatctgtaggagacagagtcaccatcacttgccgggcaagtcagagcattagcagctatttaaattggtatcagcagaaaccagggaaagcccctaagctcctgatctatgctgcatccagtttgcaaagtggggtcccatcaaggttcagtggcagtggatctgggacagatttcactctcaccatcagcagtctgcaacctgaagattttgcaacttactactgtcagcaaagctacatcgccccttacacttttggcggagggaccaaggttgagatcaaacaccatcatcatcaccat

SEQ ID NO: 691 - DNA, 1290 bp, synthetic construct
  source 1..1290: mol_type = other DNA
cccgctgctctgctgcctgcccggggtaccaacatggcccagaagcgtcctgcctgcaccctgaagcctgagtgtgtccagcagctgctggtttgctcccaggaggccaagaagtcagcctactgcccctacagtcactttcctgtgggggctgccctgctcacccaggaggggagaatcttcaaagggtgcaacatagaaaatgcctgctacccgctgggcatctgtgctgaacggaccgctatccagaaggccgtctcagaagggtacaaggatttcagggcaattgctatcgccagtgacatgcaagatgattttatctctccatgtggggcctgcaggcaagtcatgagagagtttggcaccaactggcccgtgtacatgaccaagccggatggtacgtatattggtggaggcggttcgggtggagggggatctggtggcggaggtagcggtggcgggggatcaggtggcgggggatcaggtggcgggggatcaggtggcgggggatcaggtggcgggggatcaggtggcgggggatcagacatccagatgacccagtctccatcctccctgtctgcatctgtaggagacagagtcaccatcacttgccgggcaagtcagagcattagcagctatttaaattggtatcagcagaaaccagggaaagcccctaagctcctgatctatgctgcatccagtttgcaaagtggggtcccatcaaggttcagtggcagtggatgcggtacagatttcactctcaccatcagcagtctgcaacctgaagattttgcaacttactactgtcagcaaagctacatcgccccttacacttttggcggagggaccaaggttgagatcaaaggagggggcggatcaggcggaggtggatcgggagggggtggtagcgaggtgcagctggtggagtctgggggaggcttggtccagcctggagggtccctgagactctcctgtgcagcctctggattcaccttcgtagaccacgacatggactgggtccgccaggctccagggaaggggctggagtgggttggccgtactagaaacaaactaggaagttacaccacagaatacgccgcgtctgtgaaaggcagattcaccatctcaagagatgattcaaagaactcactgtatctgcaaatgaacagcctgaaaaccgaggacacggcggtgtactactgcgccagagagcctaaatactggatcgacttcgacctatgggggagaggtaccttggtcaccgtctcctcacaccatcatcatcaccat

SEQ ID NO: 692 - DNA, 1311 bp, synthetic construct
  source 1..1311: mol_type = other DNA
cccgctgctctgctgcctgcccggggtaccaacatggcccagaagcgtcctgcctgcaccctgaagcctgagtgtgtccagcagctgctggtttgctcccaggaggccaagaagtcagcctactgcccctacagtcactttcctgtgggggctgccctgctcacccaggaggggagaatcttcaaagggtgcaacatagaaaatgcctgctacccgctgggcatctgtgctgaacggaccgctatccagaaggccgtctcagaagggtacaaggatttcagggcaattgctatcgccagtgacatgcaagatgattttatctctccatgtggggcctgcaggcaagtcatgagagagtttggcaccaactggcccgtgtacatgaccaagccggatggtacgtatattggtggaggcggttcgggtggagggggatctggtggcggaggtagcggtggcgggggatcaggtggcgggggatcaggtggcgggggatcaggtggcgggggatcaggtggcgggggatcaggtggcgggggatcaggtggcgggggatcagaggtgcagctgttggagtctgggggaggcttggtacagcctggggggtccctgagactctcctgtgcagcctctggattcacctttagcaattatgccatgagctgggtccgccaggctccagggaaggggctggagtgggtctcagctattagtggtagtggtggtagcacatactacgcagactccgtgaagggccggttcaccatctccagagacaattccaagaacacgctgtatctgcaaatgaacagcctgagagccgaggacacggcggtgtactactgcgccaagggccctcctacataccacacaaactactactacatggacgtatggggcaagggtacaactgtcaccgtctcctcaggagggggcggatcaggcggaggtggatcgggagggggtggtagcgacatccagatgacccagtctccatcttccgtgtctgcatctgtaggagacagagtcaccatcacttgtcgggcgagtcagggtattagcagctggttagcctggtatcagcagaaaccagggaaagcccctaagctcctgatctatgctgcatccagtttgcaaagtggggtcccatcaaggttcagcggcagtggatctgggacagatttcactctcaccatcagcagcctgcagcctgaagattttgcaacttattactgtcagcaaacaaatagtttcccttacacttttggcggagggaccaaggttgagatcaaacaccatcatcatcaccat

SEQ ID NO: 693 - DNA, 1311 bp, synthetic construct
  source 1..1311: mol_type = other DNA
cccgctgctctgctgcctgcccggggtaccaacatggcccagaagcgtcctgcctgcaccctgaagcctgagtgtgtccagcagctgctggtttgctcccaggaggccaagaagtcagcctactgcccctacagtcactttcctgtgggggctgccctgctcacccaggaggggagaatcttcaaagggtgcaacatagaaaatgcctgctacccgctgggcatctgtgctgaacggaccgctatccagaaggccgtctcagaagggtacaaggatttcagggcaattgctatcgccagtgacatgcaagatgattttatctctccatgtggggcctgcaggcaagtcatgagagagtttggcaccaactggcccgtgtacatgaccaagccggatggtacgtatattggtggaggcggttcgggtggagggggatctggtggcggaggtagcggtggcgggggatcaggtggcgggggatcaggtggcgggggatcaggtggcgggggatcaggtggcgggggatcaggtggcgggggatcaggtggcgggggatcagaggtgcagctgttggagtctgggggaggcttggtacagcctggggggtccctgagactctcctgtgcagcctctggattcacctttagcagctatgtcatgatctgggtccgccaggctccagggaaggggctggagtgggtctcaagcattagtggtgacagcgtaacaacatactacgcagactccgtgaagggccggttcaccatctccagagacaattccaagaacacgctgtatctgcaaatgaacagcctgagagccgaggacacggcggtgtactactgcgccaagggccctcctacataccacacaaactactactacatggacgtatggggcaagggtacaactgtcaccgtctcctcaggagggggcggatcaggcggaggtggatcgggagggggtggtagcgacatccagatgacccagtctccatcttccgtgtctgcatctgtaggagacagagtcaccatcacttgtcgggcgagtcagggtattagcagctggttagcctggtatcagcagaaaccagggaaagcccctaagctcctgatctatgctgcatccagtttgcaaagtggggtcccatcaaggttcagcggcagtggatctgggacagatttcactctcaccatcagcagcctgcagcctgaagattttgcaacttattactgtcagcaaacaaatagtttcccttacacttttggcggagggaccaaggttgagatcaaacaccatcatcatcaccat

SEQ ID NO: 694 - DNA, 1305 bp, synthetic construct
  source 1..1305: mol_type = other DNA
cccgctgctctgctgcctgcccggggtaccaacatggcccagaagcgtcctgcctgcaccctgaagcctgagtgtgtccagcagctgctggtttgctcccaggaggccaagaagtcagcctactgcccctacagtcactttcctgtgggggctgccctgctcacccaggaggggagaatcttcaaagggtgcaacatagaaaatgcctgctacccgctgggcatctgtgctgaacggaccgctatccagaaggccgtctcagaagggtacaaggatttcagggcaattgctatcgccagtgacatgcaagatgattttatctctccatgtggggcctgcaggcaagtcatgagagagtttggcaccaactggcccgtgtacatgaccaagccggatggtacgtatattggtggaggcggttcgggtggagggggatctggtggcggaggtagcggtggcgggggatcaggtggcgggggatcaggtggcgggggatcaggtggcgggggatcaggtggcgggggatcaggtggcgggggatcaggtggcgggggatcagaggtgcagctggtggagtctgggggaggcttggtccagcctggagggtccctgagactctcctgtgcagcctctggattcaccttcagtgaccactacatggactgggtccgccaggctccagggaaggggctggagtgggttggccgtactagaaacaaagctagtagttacaccacagaatacgccgcgtctgtgaaaggcagattcaccatctcaagagatgattcaaagaactcactgtatctgcaaatgaacagcctgaaaaccgaggacacggcggtgtactactgcgccagagagcctaaatactggatcgacttcgacctatgggggagaggtaccttggtcaccgtctcctcaggagggggcggatcaggcggaggtggatcgggagggggtggtagcgacatccagatgacccagtctccatcctccctgtctgcatctgtaggagacagagtcaccatcacttgccgggcaagtcagagcattagcagctatttaaattggtatcagcagaaaccagggaaagcccctaagctcctgatctatgctgcatccagtttgcaaagtggggtcccatcaaggttcagtggcagtggatctgggacagatttcactctcaccatcagcagtctgcaacctgaagattttgcaacttactactgtcagcaaagctacatcgccccttacacttttggcggagggaccaaggttgagatcaaacaccatcatcatcaccat

SEQ ID NO: 695 - DNA, 1278 bp, synthetic construct
  source 1..1278: mol_type = other DNA
cccgctgctctgctgcctgcccggggtaccaacatggcccagaagcgtcctgcctgcaccctgaagcctgagtgtgtccagcagctgctggtttgctcccaggaggccaagaagtcagcctactgcccctacagtcactttcctgtgggggctgccctgctcacccaggaggggagaatcttcaaagggtgcaacatagaaaatgcctgctacccgctgggcatctgtgctgaacggaccgctatccagaaggccgtctcagaagggtacaaggatttcagggcaattgctatcgccagtgacatgcaagatgattttatctctccatgtggggcctgcaggcaagtcatgagagagtttggcaccaactggcccgtgtacatgaccaagccggatggtacgtatattggtggaggcggttcgggtggagggggatctggtggcggaggtagcggtggcgggggatcaggtggcgggggatcaggtggcgggggatcaggtggcgggggatcaggtggcgggggatcaggtggcgggggatcaggtggcgggggatcagaggtgcagctggtggagtctgggggaggcttggtacagccagggcggtccctgagactctcctgtacagcttctggattcaccttcagtgaccacgacatgaactgggtccgccaggctccagggaaggggctggagtgggttggccgtactagaaacgccgctggaagttacaccacagaatacgccgcgtctgtgaaaggcagattcaccatctcaagagatgattcaaagaactcactgtatctgcaaatgaacagcctgaaaaccgaggacacggcggtgtactactgcgccagagagcctaaatactggatcgacttcgacctatgggggggagggggcggatcaggcggaggtggatcgggagggggtggtagcgacatccagatgacccagtctccatcctccctgtctgcatctgtaggagacagagtcaccatcacttgccgggcaagtcagagcattagcagctatttaaattggtatcagcagaaaccagggaaagcccctaagctcctgatctatgctgcatccagtttgcaaagtggggtcccatcaaggttcagtggcagtggatctgggacagatttcactctcaccatcagcagtctgcaacctgaagattttgcaacttactactgtcagcaaagctacatcgccccttacacttttggcggagggaccaaggttgagatcaaacaccatcatcatcaccat

SEQ ID NO: 696 - DNA, 1305 bp, synthetic construct
  source 1..1305: mol_type = other DNA
cccgctgctctgctgcctgcccggggtaccaacatggcccagaagcgtcctgcctgcaccctgaagcctgagtgtgtccagcagctgctggtttgctcccaggaggccaagaagtcagcctactgcccctacagtcactttcctgtgggggctgccctgctcacccaggaggggagaatcttcaaagggtgcaacatagaaaatgcctgctacccgctgggcatctgtgctgaacggaccgctatccagaaggccgtctcagaagggtacaaggatttcagggcaattgctatcgccagtgacatgcaagatgattttatctctccatgtggggcctgcaggcaagtcatgagagagtttggcaccaactggcccgtgtacatgaccaagccggatggtacgtatattggtggaggcggttcgggtggagggggatctggtggcggaggtagcggtggcgggggatcaggtggcgggggatcaggtggcgggggatcaggtggcgggggatcaggtggcgggggatcaggtggcgggggatcaggtggcgggggatcagacatccagatgacccagtctccatcctccctgtctgcatctgtaggagacagagtcaccatcacttgccgggcaagtcagagcattagcagctatttaaattggtatcagcagaaaccagggaaagcccctaagctcctgatctatgctgcatccagtttgcaaagtggggtcccatcaaggttcagtggcagtggatgcggtacagatttcactctcaccatcagcagtctgcaacctgaagattttgcaacttactactgtcagcaaagctacatcgccccttacacttttggcggagggaccaaggttgagatcaaaggagggggcggatcaggcggaggtggatcgggagggggtggtagcgaggtgcagctggtggagtctgggggaggcttggtccagcctggagggtccctgagactctcctgtgcagcctctggattcaccttcgtagaccacgacatggactgggtccgccaggctccagggaaggggctggagtgggttggccgtactagaaacaaactaggaagttacaccacagaatacgccgcgtctgtgaaaggcagattcaccatctcaagagatgattcaaagaactcactgtatctgcaaatgaacagcctgaaaaccgaggacacggcggtgtactactgcgccagagagcctaaatactggatcgacttcgacctatgggggagaggtaccttggtcaccgtctcctcacaccatcatcatcaccat

SEQ ID NO: 697 - DNA, 1326 bp, synthetic construct
  source 1..1326: mol_type = other DNA
cccgctgctctgctgcctgcccggggtaccaacatggcccagaagcgtcctgcctgcaccctgaagcctgagtgtgtccagcagctgctggtttgctcccaggaggccaagaagtcagcctactgcccctacagtcactttcctgtgggggctgccctgctcacccaggaggggagaatcttcaaagggtgcaacatagaaaatgcctgctacccgctgggcatctgtgctgaacggaccgctatccagaaggccgtctcagaagggtacaaggatttcagggcaattgctatcgccagtgacatgcaagatgattttatctctccatgtggggcctgcaggcaagtcatgagagagtttggcaccaactggcccgtgtacatgaccaagccggatggtacgtatattggtggaggcggttcgggtggagggggatctggtggcggaggtagcggtggcgggggatcaggtggcgggggatcaggtggcgggggatcaggtggcgggggatcaggtggcgggggatcaggtggcgggggatcaggtggcgggggatcaggtggcgggggatcagaggtgcagctgttggagtctgggggaggcttggtacagcctggggggtccctgagactctcctgtgcagcctctggattcacctttagcaattatgccatgagctgggtccgccaggctccagggaaggggctggagtgggtctcagctattagtggtagtggtggtagcacatactacgcagactccgtgaagggccggttcaccatctccagagacaattccaagaacacgctgtatctgcaaatgaacagcctgagagccgaggacacggcggtgtactactgcgccaagggccctcctacataccacacaaactactactacatggacgtatggggcaagggtacaactgtcaccgtctcctcaggagggggcggatcaggcggaggtggatcgggagggggtggtagcgacatccagatgacccagtctccatcttccgtgtctgcatctgtaggagacagagtcaccatcacttgtcgggcgagtcagggtattagcagctggttagcctggtatcagcagaaaccagggaaagcccctaagctcctgatctatgctgcatccagtttgcaaagtggggtcccatcaaggttcagcggcagtggatctgggacagatttcactctcaccatcagcagcctgcagcctgaagattttgcaacttattactgtcagcaaacaaatagtttcccttacacttttggcggagggaccaaggttgagatcaaacaccatcatcatcaccat

SEQ ID NO: 698 - DNA, 1326 bp, synthetic construct
  source 1..1326: mol_type = other DNA
cccgctgctctgctgcctgcccggggtaccaacatggcccagaagcgtcctgcctgcaccctgaagcctgagtgtgtccagcagctgctggtttgctcccaggaggccaagaagtcagcctactgcccctacagtcactttcctgtgggggctgccctgctcacccaggaggggagaatcttcaaagggtgcaacatagaaaatgcctgctacccgctgggcatctgtgctgaacggaccgctatccagaaggccgtctcagaagggtacaaggatttcagggcaattgctatcgccagtgacatgcaagatgattttatctctccatgtggggcctgcaggcaagtcatgagagagtttggcaccaactggcccgtgtacatgaccaagccggatggtacgtatattggtggaggcggttcgggtggagggggatctggtggcggaggtagcggtggcgggggatcaggtggcgggggatcaggtggcgggggatcaggtggcgggggatcaggtggcgggggatcaggtggcgggggatcaggtggcgggggatcaggtggcgggggatcagaggtgcagctgttggagtctgggggaggcttggtacagcctggggggtccctgagactctcctgtgcagcctctggattcacctttagcagctatgtcatgatctgggtccgccaggctccagggaaggggctggagtgggtctcaagcattagtggtgacagcgtaacaacatactacgcagactccgtgaagggccggttcaccatctccagagacaattccaagaacacgctgtatctgcaaatgaacagcctgagagccgaggacacggcggtgtactactgcgccaagggccctcctacataccacacaaactactactacatggacgtatggggcaagggtacaactgtcaccgtctcctcaggagggggcggatcaggcggaggtggatcgggagggggtggtagcgacatccagatgacccagtctccatcttccgtgtctgcatctgtaggagacagagtcaccatcacttgtcgggcgagtcagggtattagcagctggttagcctggtatcagcagaaaccagggaaagcccctaagctcctgatctatgctgcatccagtttgcaaagtggggtcccatcaaggttcagcggcagtggatctgggacagatttcactctcaccatcagcagcctgcagcctgaagattttgcaacttattactgtcagcaaacaaatagtttcccttacacttttggcggagggaccaaggttgagatcaaacaccatcatcatcaccat

SEQ ID NO: 699 - DNA, 1320 bp, synthetic construct
  source 1..1320: mol_type = other DNA
cccgctgctctgctgcctgcccggggtaccaacatggcccagaagcgtcctgcctgcaccctgaagcctgagtgtgtccagcagctgctggtttgctcccaggaggccaagaagtcagcctactgcccctacagtcactttcctgtgggggctgccctgctcacccaggaggggagaatcttcaaagggtgcaacatagaaaatgcctgctacccgctgggcatctgtgctgaacggaccgctatccagaaggccgtctcagaagggtacaaggatttcagggcaattgctatcgccagtgacatgcaagatgattttatctctccatgtggggcctgcaggcaagtcatgagagagtttggcaccaactggcccgtgtacatgaccaagccggatggtacgtatattggtggaggcggttcgggtggagggggatctggtggcggaggtagcggtggcgggggatcaggtggcgggggatcaggtggcgggggatcaggtggcgggggatcaggtggcgggggatcaggtggcgggggatcaggtggcgggggatcaggtggcgggggatcagaggtgcagctggtggagtctgggggaggcttggtccagcctggagggtccctgagactctcctgtgcagcctctggattcaccttcagtgaccactacatggactgggtccgccaggctccagggaaggggctggagtgggttggccgtactagaaacaaagctagtagttacaccacagaatacgccgcgtctgtgaaaggcagattcaccatctcaagagatgattcaaagaactcactgtatctgcaaatgaacagcctgaaaaccgaggacacggcggtgtactactgcgccagagagcctaaatactggatcgacttcgacctatgggggagaggtaccttggtcaccgtctcctcaggagggggcggatcaggcggaggtggatcgggagggggtggtagcgacatccagatgacccagtctccatcctccctgtctgcatctgtaggagacagagtcaccatcacttgccgggcaagtcagagcattagcagctatttaaattggtatcagcagaaaccagggaaagcccctaagctcctgatctatgctgcatccagtttgcaaagtggggtcccatcaaggttcagtggcagtggatctgggacagatttcactctcaccatcagcagtctgcaacctgaagattttgcaacttactactgtcagcaaagctacatcgccccttacacttttggcggagggaccaaggttgagatcaaacaccatcatcatcaccat

SEQ ID NO: 700 - DNA, 1293 bp, synthetic construct
  source 1..1293: mol_type = other DNA
cccgctgctctgctgcctgcccggggtaccaacatggcccagaagcgtcctgcctgcaccctgaagcctgagtgtgtccagcagctgctggtttgctcccaggaggccaagaagtcagcctactgcccctacagtcactttcctgtgggggctgccctgctcacccaggaggggagaatcttcaaagggtgcaacatagaaaatgcctgctacccgctgggcatctgtgctgaacggaccgctatccagaaggccgtctcagaagggtacaaggatttcagggcaattgctatcgccagtgacatgcaagatgattttatctctccatgtggggcctgcaggcaagtcatgagagagtttggcaccaactggcccgtgtacatgaccaagccggatggtacgtatattggtggaggcggttcgggtggagggggatctggtggcggaggtagcggtggcgggggatcaggtggcgggggatcaggtggcgggggatcaggtggcgggggatcaggtggcgggggatcaggtggcgggggatcaggtggcgggggatcaggtggcgggggatcagaggtgcagctggtggagtctgggggaggcttggtacagccagggcggtccctgagactctcctgtacagcttctggattcaccttcagtgaccacgacatgaactgggtccgccaggctccagggaaggggctggagtgggttggccgtactagaaacgccgctggaagttacaccacagaatacgccgcgtctgtgaaaggcagattcaccatctcaagagatgattcaaagaactcactgtatctgcaaatgaacagcctgaaaaccgaggacacggcggtgtactactgcgccagagagcctaaatactggatcgacttcgacctatgggggggagggggcggatcaggcggaggtggatcgggagggggtggtagcgacatccagatgacccagtctccatcctccctgtctgcatctgtaggagacagagtcaccatcacttgccgggcaagtcagagcattagcagctatttaaattggtatcagcagaaaccagggaaagcccctaagctcctgatctatgctgcatccagtttgcaaagtggggtcccatcaaggttcagtggcagtggatctgggacagatttcactctcaccatcagcagtctgcaacctgaagattttgcaacttactactgtcagcaaagctacatcgccccttacacttttggcggagggaccaaggttgagatcaaacaccatcatcatcaccat

SEQ ID NO: 701 - DNA, 1320 bp, synthetic construct
  source 1..1320: mol_type = other DNA
cccgctgctctgctgcctgcccggggtaccaacatggcccagaagcgtcctgcctgcaccctgaagcctgagtgtgtccagcagctgctggtttgctcccaggaggccaagaagtcagcctactgcccctacagtcactttcctgtgggggctgccctgctcacccaggaggggagaatcttcaaagggtgcaacatagaaaatgcctgctacccgctgggcatctgtgctgaacggaccgctatccagaaggccgtctcagaagggtacaaggatttcagggcaattgctatcgccagtgacatgcaagatgattttatctctccatgtggggcctgcaggcaagtcatgagagagtttggcaccaactggcccgtgtacatgaccaagccggatggtacgtatattggtggaggcggttcgggtggagggggatctggtggcggaggtagcggtggcgggggatcaggtggcgggggatcaggtggcgggggatcaggtggcgggggatcaggtggcgggggatcaggtggcgggggatcaggtggcgggggatcaggtggcgggggatcagacatccagatgacccagtctccatcctccctgtctgcatctgtaggagacagagtcaccatcacttgccgggcaagtcagagcattagcagctatttaaattggtatcagcagaaaccagggaaagcccctaagctcctgatctatgctgcatccagtttgcaaagtggggtcccatcaaggttcagtggcagtggatgcggtacagatttcactctcaccatcagcagtctgcaacctgaagattttgcaacttactactgtcagcaaagctacatcgccccttacacttttggcggagggaccaaggttgagatcaaaggagggggcggatcaggcggaggtggatcgggagggggtggtagcgaggtgcagctggtggagtctgggggaggcttggtccagcctggagggtccctgagactctcctgtgcagcctctggattcaccttcgtagaccacgacatggactgggtccgccaggctccagggaaggggctggagtgggttggccgtactagaaacaaactaggaagttacaccacagaatacgccgcgtctgtgaaaggcagattcaccatctcaagagatgattcaaagaactcactgtatctgcaaatgaacagcctgaaaaccgaggacacggcggtgtactactgcgccagagagcctaaatactggatcgacttcgacctatgggggagaggtaccttggtcaccgtctcctcacaccatcatcatcaccat

SEQ ID NO: 702 - DNA, 1341 bp, synthetic construct
  source 1..1341: mol_type = other DNA
cccgctgctctgctgcctgcccggggtaccaacatggcccagaagcgtcctgcctgcaccctgaagcctgagtgtgtccagcagctgctggtttgctcccaggaggccaagaagtcagcctactgcccctacagtcactttcctgtgggggctgccctgctcacccaggaggggagaatcttcaaagggtgcaacatagaaaatgcctgctacccgctgggcatctgtgctgaacggaccgctatccagaaggccgtctcagaagggtacaaggatttcagggcaattgctatcgccagtgacatgcaagatgattttatctctccatgtggggcctgcaggcaagtcatgagagagtttggcaccaactggcccgtgtacatgaccaagccggatggtacgtatattggtggaggcggttcgggtggagggggatctggtggcggaggtagcggtggcgggggatcaggtggcgggggatcaggtggcgggggatcaggtggcgggggatcaggtggcgggggatcaggtggcgggggatcaggtggcgggggatcaggtggcgggggatcaggtggcgggggatcagaggtgcagctgttggagtctgggggaggcttggtacagcctggggggtccctgagactctcctgtgcagcctctggattcacctttagcaattatgccatgagctgggtccgccaggctccagggaaggggctggagtgggtctcagctattagtggtagtggtggtagcacatactacgcagactccgtgaagggccggttcaccatctccagagacaattccaagaacacgctgtatctgcaaatgaacagcctgagagccgaggacacggcggtgtactactgcgccaagggccctcctacataccacacaaactactactacatggacgtatggggcaagggtacaactgtcaccgtctcctcaggagggggcggatcaggcggaggtggatcgggagggggtggtagcgacatccagatgacccagtctccatcttccgtgtctgcatctgtaggagacagagtcaccatcacttgtcgggcgagtcagggtattagcagctggttagcctggtatcagcagaaaccagggaaagcccctaagctcctgatctatgctgcatccagtttgcaaagtggggtcccatcaaggttcagcggcagtggatctgggacagatttcactctcaccatcagcagcctgcagcctgaagattttgcaacttattactgtcagcaaacaaatagtttcccttacacttttggcggagggaccaaggttgagatcaaacaccatcatcatcaccat

SEQ ID NO: 703 - DNA, 1341 bp, synthetic construct
  source 1..1341: mol_type = other DNA
cccgctgctctgctgcctgcccggggtaccaacatggcccagaagcgtcctgcctgcaccctgaagcctgagtgtgtccagcagctgctggtttgctcccaggaggccaagaagtcagcctactgcccctacagtcactttcctgtgggggctgccctgctcacccaggaggggagaatcttcaaagggtgcaacatagaaaatgcctgctacccgctgggcatctgtgctgaacggaccgctatccagaaggccgtctcagaagggtacaaggatttcagggcaattgctatcgccagtgacatgcaagatgattttatctctccatgtggggcctgcaggcaagtcatgagagagtttggcaccaactggcccgtgtacatgaccaagccggatggtacgtatattggtggaggcggttcgggtggagggggatctggtggcggaggtagcggtggcgggggatcaggtggcgggggatcaggtggcgggggatcaggtggcgggggatcaggtggcgggggatcaggtggcgggggatcaggtggcgggggatcaggtggcgggggatcaggtggcgggggatcagaggtgcagctgttggagtctgggggaggcttggtacagcctggggggtccctgagactctcctgtgcagcctctggattcacctttagcagctatgtcatgatctgggtccgccaggctccagggaaggggctggagtgggtctcaagcattagtggtgacagcgtaacaacatactacgcagactccgtgaagggccggttcaccatctccagagacaattccaagaacacgctgtatctgcaaatgaacagcctgagagccgaggacacggcggtgtactactgcgccaagggccctcctacataccacacaaactactactacatggacgtatggggcaagggtacaactgtcaccgtctcctcaggagggggcggatcaggcggaggtggatcgggagggggtggtagcgacatccagatgacccagtctccatcttccgtgtctgcatctgtaggagacagagtcaccatcacttgtcgggcgagtcagggtattagcagctggttagcctggtatcagcagaaaccagggaaagcccctaagctcctgatctatgctgcatccagtttgcaaagtggggtcccatcaaggttcagcggcagtggatctgggacagatttcactctcaccatcagcagcctgcagcctgaagattttgcaacttattactgtcagcaaacaaatagtttcccttacacttttggcggagggaccaaggttgagatcaaacaccatcatcatcaccat

SEQ ID NO: 704 - DNA, 1335 bp, synthetic construct
  source 1..1335: mol_type = other DNA
cccgctgctctgctgcctgcccggggtaccaacatggcccagaagcgtcctgcctgcaccctgaagcctgagtgtgtccagcagctgctggtttgctcccaggaggccaagaagtcagcctactgcccctacagtcactttcctgtgggggctgccctgctcacccaggaggggagaatcttcaaagggtgcaacatagaaaatgcctgctacccgctgggcatctgtgctgaacggaccgctatccagaaggccgtctcagaagggtacaaggatttcagggcaattgctatcgccagtgacatgcaagatgattttatctctccatgtggggcctgcaggcaagtcatgagagagtttggcaccaactggcccgtgtacatgaccaagccggatggtacgtatattggtggaggcggttcgggtggagggggatctggtggcggaggtagcggtggcgggggatcaggtggcgggggatcaggtggcgggggatcaggtggcgggggatcaggtggcgggggatcaggtggcgggggatcaggtggcgggggatcaggtggcgggggatcaggtggcgggggatcagaggtgcagctggtggagtctgggggaggcttggtccagcctggagggtccctgagactctcctgtgcagcctctggattcaccttcagtgaccactacatggactgggtccgccaggctccagggaaggggctggagtgggttggccgtactagaaacaaagctagtagttacaccacagaatacgccgcgtctgtgaaaggcagattcaccatctcaagagatgattcaaagaactcactgtatctgcaaatgaacagcctgaaaaccgaggacacggcggtgtactactgcgccagagagcctaaatactggatcgacttcgacctatgggggagaggtaccttggtcaccgtctcctcaggagggggcggatcaggcggaggtggatcgggagggggtggtagcgacatccagatgacccagtctccatcctccctgtctgcatctgtaggagacagagtcaccatcacttgccgggcaagtcagagcattagcagctatttaaattggtatcagcagaaaccagggaaagcccctaagctcctgatctatgctgcatccagtttgcaaagtggggtcccatcaaggttcagtggcagtggatctgggacagatttcactctcaccatcagcagtctgcaacctgaagattttgcaacttactactgtcagcaaagctacatcgccccttacacttttggcggagggaccaaggttgagatcaaacaccatcatcatcaccat

SEQ ID NO: 705 - DNA, 1308 bp, synthetic construct
  source 1..1308: mol_type = other DNA
cccgctgctctgctgcctgcccggggtaccaacatggcccagaagcgtcctgcctgcaccctgaagcctgagtgtgtccagcagctgctggtttgctcccaggaggccaagaagtcagcctactgcccctacagtcactttcctgtgggggctgccctgctcacccaggaggggagaatcttcaaagggtgcaacatagaaaatgcctgctacccgctgggcatctgtgctgaacggaccgctatccagaaggccgtctcagaagggtacaaggatttcagggcaattgctatcgccagtgacatgcaagatgattttatctctccatgtggggcctgcaggcaagtcatgagagagtttggcaccaactggcccgtgtacatgaccaagccggatggtacgtatattggtggaggcggttcgggtggagggggatctggtggcggaggtagcggtggcgggggatcaggtggcgggggatcaggtggcgggggatcaggtggcgggggatcaggtggcgggggatcaggtggcgggggatcaggtggcgggggatcaggtggcgggggatcaggtggcgggggatcagaggtgcagctggtggagtctgggggaggcttggtacagccagggcggtccctgagactctcctgtacagcttctggattcaccttcagtgaccacgacatgaactgggtccgccaggctccagggaaggggctggagtgggttggccgtactagaaacgccgctggaagttacaccacagaatacgccgcgtctgtgaaaggcagattcaccatctcaagagatgattcaaagaactcactgtatctgcaaatgaacagcctgaaaaccgaggacacggcggtgtactactgcgccagagagcctaaatactggatcgacttcgacctatgggggggagggggcggatcaggcggaggtggatcgggagggggtggtagcgacatccagatgacccagtctccatcctccctgtctgcatctgtaggagacagagtcaccatcacttgccgggcaagtcagagcattagcagctatttaaattggtatcagcagaaaccagggaaagcccctaagctcctgatctatgctgcatccagtttgcaaagtggggtcccatcaaggttcagtggcagtggatctgggacagatttcactctcaccatcagcagtctgcaacctgaagattttgcaacttactactgtcagcaaagctacatcgccccttacacttttggcggagggaccaaggttgagatcaaacaccatcatcatcaccat

SEQ ID NO: 706 - DNA, 1335 bp, synthetic construct
  source 1..1335: mol_type = other DNA
cccgctgctctgctgcctgcccggggtaccaacatggcccagaagcgtcctgcctgcaccctgaagcctgagtgtgtccagcagctgctggtttgctcccaggaggccaagaagtcagcctactgcccctacagtcactttcctgtgggggctgccctgctcacccaggaggggagaatcttcaaagggtgcaacatagaaaatgcctgctacccgctgggcatctgtgctgaacggaccgctatccagaaggccgtctcagaagggtacaaggatttcagggcaattgctatcgccagtgacatgcaagatgattttatctctccatgtggggcctgcaggcaagtcatgagagagtttggcaccaactggcccgtgtacatgaccaagccggatggtacgtatattggtggaggcggttcgggtggagggggatctggtggcggaggtagcggtggcgggggatcaggtggcgggggatcaggtggcgggggatcaggtggcgggggatcaggtggcgggggatcaggtggcgggggatcaggtggcgggggatcaggtggcgggggatcaggtggcgggggatcagacatccagatgacccagtctccatcctccctgtctgcatctgtaggagacagagtcaccatcacttgccgggcaagtcagagcattagcagctatttaaattggtatcagcagaaaccagggaaagcccctaagctcctgatctatgctgcatccagtttgcaaagtggggtcccatcaaggttcagtggcagtggatgcggtacagatttcactctcaccatcagcagtctgcaacctgaagattttgcaacttactactgtcagcaaagctacatcgccccttacacttttggcggagggaccaaggttgagatcaaaggagggggcggatcaggcggaggtggatcgggagggggtggtagcgaggtgcagctggtggagtctgggggaggcttggtccagcctggagggtccctgagactctcctgtgcagcctctggattcaccttcgtagaccacgacatggactgggtccgccaggctccagggaaggggctggagtgggttggccgtactagaaacaaactaggaagttacaccacagaatacgccgcgtctgtgaaaggcagattcaccatctcaagagatgattcaaagaactcactgtatctgcaaatgaacagcctgaaaaccgaggacacggcggtgtactactgcgccagagagcctaaatactggatcgacttcgacctatgggggagaggtaccttggtcaccgtctcctcacaccatcatcatcaccat

SEQ ID NO: 707 - DNA, 1158 bp, synthetic construct
  source 1..1158: mol_type = other DNA
gacatccagatgacccagtctccatcttccgtgtctgcatctgtaggagacagagtcaccatcacttgtcgggcgagtcagggtattagcagctggttagcctggtatcagcagaaaccagggaaagcccctaagctcctgatctatgctgcatccagtttgcaaagtggggtcccatcaaggttcagcggcagtggatctgggacagatttcactctcaccatcagcagcctgcagcctgaagattttgcaacttattactgtcagcaaacaaatagtttcccttacacttttggcggagggaccaaggttgagatcaaaggagggggcggatcaggcggaggtggatcgggagggggtggtagcgaggtgcagctgttggagtctgggggaggcttggtacagcctggggggtccctgagactctcctgtgcagcctctggattcacctttagcaattatgccatgagctgggtccgccaggctccagggaaggggctggagtgggtctcagctattagtggtagtggtggtagcacatactacgcagactccgtgaagggccggttcaccatctccagagacaattccaagaacacgctgtatctgcaaatgaacagcctgagagccgaggacacggcggtgtactactgcgccaagggccctcctacataccacacaaactactactacatggacgtatggggcaagggtacaactgtcaccgtctcctcaggtggcgggggatcacccgctgctctgctgcctgcccggggtaccaacatggcccagaagcgtcctgcctgcaccctgaagcctgagtgtgtccagcagctgctggtttgctcccaggaggccaagaagtcagcctactgcccctacagtcactttcctgtgggggctgccctgctcacccaggaggggagaatcttcaaagggtgcaacatagaaaatgcctgctacccgctgggcatctgtgctgaacggaccgctatccagaaggccgtctcagaagggtacaaggatttcagggcaattgctatcgccagtgacatgcaagatgattttatctctccatgtggggcctgcaggcaagtcatgagagagtttggcaccaactggcccgtgtacatgaccaagccggatggtacgtatatt

SEQ ID NO: 708 - DNA, 1188 bp, synthetic construct
  source 1..1188: mol_type = other DNA
gacatccagatgacccagtctccatcttccgtgtctgcatctgtaggagacagagtcaccatcacttgtcgggcgagtcagggtattagcagctggttagcctggtatcagcagaaaccagggaaagcccctaagctcctgatctatgctgcatccagtttgcaaagtggggtcccatcaaggttcagcggcagtggatctgggacagatttcactctcaccatcagcagcctgcagcctgaagattttgcaacttattactgtcagcaaacaaatagtttcccttacacttttggcggagggaccaaggttgagatcaaaggagggggcggatcaggcggaggtggatcgggagggggtggtagcgaggtgcagctgttggagtctgggggaggcttggtacagcctggggggtccctgagactctcctgtgcagcctctggattcacctttagcaattatgccatgagctgggtccgccaggctccagggaaggggctggagtgggtctcagctattagtggtagtggtggtagcacatactacgcagactccgtgaagggccggttcaccatctccagagacaattccaagaacacgctgtatctgcaaatgaacagcctgagagccgaggacacggcggtgtactactgcgccaagggccctcctacataccacacaaactactactacatggacgtatggggcaagggtacaactgtcaccgtctcctcaggagggggcggatcaggcggaggtggatcgggagggggtggtagccccgctgctctgctgcctgcccggggtaccaacatggcccagaagcgtcctgcctgcaccctgaagcctgagtgtgtccagcagctgctggtttgctcccaggaggccaagaagtcagcctactgcccctacagtcactttcctgtgggggctgccctgctcacccaggaggggagaatcttcaaagggtgcaacatagaaaatgcctgctacccgctgggcatctgtgctgaacggaccgctatccagaaggccgtctcagaagggtacaaggatttcagggcaattgctatcgccagtgacatgcaagatgattttatctctccatgtggggcctgcaggcaagtcatgagagagtttggcaccaactggcccgtgtacatgaccaagccggatggtacgtatatt

SEQ ID NO: 709 - DNA, 1203 bp, synthetic construct
  source 1..1203: mol_type = other DNA
gacatccagatgacccagtctccatcttccgtgtctgcatctgtaggagacagagtcaccatcacttgtcgggcgagtcagggtattagcagctggttagcctggtatcagcagaaaccagggaaagcccctaagctcctgatctatgctgcatccagtttgcaaagtggggtcccatcaaggttcagcggcagtggatctgggacagatttcactctcaccatcagcagcctgcagcctgaagattttgcaacttattactgtcagcaaacaaatagtttcccttacacttttggcggagggaccaaggttgagatcaaaggagggggcggatcaggcggaggtggatcgggagggggtggtagcgaggtgcagctgttggagtctgggggaggcttggtacagcctggggggtccctgagactctcctgtgcagcctctggattcacctttagcaattatgccatgagctgggtccgccaggctccagggaaggggctggagtgggtctcagctattagtggtagtggtggtagcacatactacgcagactccgtgaagggccggttcaccatctccagagacaattccaagaacacgctgtatctgcaaatgaacagcctgagagccgaggacacggcggtgtactactgcgccaagggccctcctacataccacacaaactactactacatggacgtatggggcaagggtacaactgtcaccgtctcctcaggtggaggcggttcgggtggagggggatctggtggcggaggtagcggtggcgggggatcacccgctgctctgctgcctgcccggggtaccaacatggcccagaagcgtcctgcctgcaccctgaagcctgagtgtgtccagcagctgctggtttgctcccaggaggccaagaagtcagcctactgcccctacagtcactttcctgtgggggctgccctgctcacccaggaggggagaatcttcaaagggtgcaacatagaaaatgcctgctacccgctgggcatctgtgctgaacggaccgctatccagaaggccgtctcagaagggtacaaggatttcagggcaattgctatcgccagtgacatgcaagatgattttatctctccatgtggggcctgcaggcaagtcatgagagagtttggcaccaactggcccgtgtacatgaccaagccggatggtacgtatatt

SEQ ID NO: 710 - DNA, 1218 bp, synthetic construct
  source 1..1218: mol_type = other DNA
gacatccagatgacccagtctccatcttccgtgtctgcatctgtaggagacagagtcaccatcacttgtcgggcgagtcagggtattagcagctggttagcctggtatcagcagaaaccagggaaagcccctaagctcctgatctatgctgcatccagtttgcaaagtggggtcccatcaaggttcagcggcagtggatctgggacagatttcactctcaccatcagcagcctgcagcctgaagattttgcaacttattactgtcagcaaacaaatagtttcccttacacttttggcggagggaccaaggttgagatcaaaggagggggcggatcaggcggaggtggatcgggagggggtggtagcgaggtgcagctgttggagtctgggggaggcttggtacagcctggggggtccctgagactctcctgtgcagcctctggattcacctttagcaattatgccatgagctgggtccgccaggctccagggaaggggctggagtgggtctcagctattagtggtagtggtggtagcacatactacgcagactccgtgaagggccggttcaccatctccagagacaattccaagaacacgctgtatctgcaaatgaacagcctgagagccgaggacacggcggtgtactactgcgccaagggccctcctacataccacacaaactactactacatggacgtatggggcaagggtacaactgtcaccgtctcctcaggtggaggcggttcgggtggagggggatctggtggcggaggtagcggtggcgggggatcaggtggcgggggatcacccgctgctctgctgcctgcccggggtaccaacatggcccagaagcgtcctgcctgcaccctgaagcctgagtgtgtccagcagctgctggtttgctcccaggaggccaagaagtcagcctactgcccctacagtcactttcctgtgggggctgccctgctcacccaggaggggagaatcttcaaagggtgcaacatagaaaatgcctgctacccgctgggcatctgtgctgaacggaccgctatccagaaggccgtctcagaagggtacaaggatttcagggcaattgctatcgccagtgacatgcaagatgattttatctctccatgtggggcctgcaggcaagtcatgagagagtttggcaccaactggcccgtgtacatgaccaagccggatggtacgtatatt

SEQ ID NO: 711 - DNA, 1233 bp, synthetic construct
  source 1..1233: mol_type = other DNA
gacatccagatgacccagtctccatcttccgtgtctgcatctgtaggagacagagtcaccatcacttgtcgggcgagtcagggtattagcagctggttagcctggtatcagcagaaaccagggaaagcccctaagctcctgatctatgctgcatccagtttgcaaagtggggtcccatcaaggttcagcggcagtggatctgggacagatttcactctcaccatcagcagcctgcagcctgaagattttgcaacttattactgtcagcaaacaaatagtttcccttacacttttggcggagggaccaaggttgagatcaaaggagggggcggatcaggcggaggtggatcgggagggggtggtagcgaggtgcagctgttggagtctgggggaggcttggtacagcctggggggtccctgagactctcctgtgcagcctctggattcacctttagcaattatgccatgagctgggtccgccaggctccagggaaggggctggagtgggtctcagctattagtggtagtggtggtagcacatactacgcagactccgtgaagggccggttcaccatctccagagacaattccaagaacacgctgtatctgcaaatgaacagcctgagagccgaggacacggcggtgtactactgcgccaagggccctcctacataccacacaaactactactacatggacgtatggggcaagggtacaactgtcaccgtctcctcaggtggaggcggttcgggtggagggggatctggtggcggaggtagcggtggcgggggatcaggtggcgggggatcaggtggcgggggatcacccgctgctctgctgcctgcccggggtaccaacatggcccagaagcgtcctgcctgcaccctgaagcctgagtgtgtccagcagctgctggtttgctcccaggaggccaagaagtcagcctactgcccctacagtcactttcctgtgggggctgccctgctcacccaggaggggagaatcttcaaagggtgcaacatagaaaatgcctgctacccgctgggcatctgtgctgaacggaccgctatccagaaggccgtctcagaagggtacaaggatttcagggcaattgctatcgccagtgacatgcaagatgattttatctctccatgtggggcctgcaggcaagtcatgagagagtttggcaccaactggcccgtgtacatgaccaagccggatggtacgtatatt

SEQ ID NO: 712 - DNA, 1248 bp, synthetic construct
  source 1..1248: mol_type = other DNA
gacatccagatgacccagtctccatcttccgtgtctgcatctgtaggagacagagtcaccatcacttgtcgggcgagtcagggtattagcagctggttagcctggtatcagcagaaaccagggaaagcccctaagctcctgatctatgctgcatccagtttgcaaagtggggtcccatcaaggttcagcggcagtggatctgggacagatttcactctcaccatcagcagcctgcagcctgaagattttgcaacttattactgtcagcaaacaaatagtttcccttacacttttggcggagggaccaaggttgagatcaaaggagggggcggatcaggcggaggtggatcgggagggggtggtagcgaggtgcagctgttggagtctgggggaggcttggtacagcctggggggtccctgagactctcctgtgcagcctctggattcacctttagcaattatgccatgagctgggtccgccaggctccagggaaggggctggagtgggtctcagctattagtggtagtggtggtagcacatactacgcagactccgtgaagggccggttcaccatctccagagacaattccaagaacacgctgtatctgcaaatgaacagcctgagagccgaggacacggcggtgtactactgcgccaagggccctcctacataccacacaaactactactacatggacgtatggggcaagggtacaactgtcaccgtctcctcaggtggaggcggttcgggtggagggggatctggtggcggaggtagcggtggcgggggatcaggtggcgggggatcaggtggcgggggatcaggtggcgggggatcacccgctgctctgctgcctgcccggggtaccaacatggcccagaagcgtcctgcctgcaccctgaagcctgagtgtgtccagcagctgctggtttgctcccaggaggccaagaagtcagcctactgcccctacagtcactttcctgtgggggctgccctgctcacccaggaggggagaatcttcaaagggtgcaacatagaaaatgcctgctacccgctgggcatctgtgctgaacggaccgctatccagaaggccgtctcagaagggtacaaggatttcagggcaattgctatcgccagtgacatgcaagatgattttatctctccatgtggggcctgcaggcaagtcatgagagagtttggcaccaactggcccgtgtacatgaccaagccggatggtacgtatatt

SEQ ID NO: 713 - DNA, 1263 bp, synthetic construct
  source 1..1263: mol_type = other DNA
gacatccagatgacccagtctccatcttccgtgtctgcatctgtaggagacagagtcaccatcacttgtcgggcgagtcagggtattagcagctggttagcctggtatcagcagaaaccagggaaagcccctaagctcctgatctatgctgcatccagtttgcaaagtggggtcccatcaaggttcagcggcagtggatctgggacagatttcactctcaccatcagcagcctgcagcctgaagattttgcaacttattactgtcagcaaacaaatagtttcccttacacttttggcggagggaccaaggttgagatcaaaggagggggcggatcaggcggaggtggatcgggagggggtggtagcgaggtgcagctgttggagtctgggggaggcttggtacagcctggggggtccctgagactctcctgtgcagcctctggattcacctttagcaattatgccatgagctgggtccgccaggctccagggaaggggctggagtgggtctcagctattagtggtagtggtggtagcacatactacgcagactccgtgaagggccggttcaccatctccagagacaattccaagaacacgctgtatctgcaaatgaacagcctgagagccgaggacacggcggtgtactactgcgccaagggccctcctacataccacacaaactactactacatggacgtatggggcaagggtacaactgtcaccgtctcctcaggtggaggcggttcgggtggagggggatctggtggcggaggtagcggtggcgggggatcaggtggcgggggatcaggtggcgggggatcaggtggcgggggatcaggtggcgggggatcacccgctgctctgctgcctgcccggggtaccaacatggcccagaagcgtcctgcctgcaccctgaagcctgagtgtgtccagcagctgctggtttgctcccaggaggccaagaagtcagcctactgcccctacagtcactttcctgtgggggctgccctgctcacccaggaggggagaatcttcaaagggtgcaacatagaaaatgcctgctacccgctgggcatctgtgctgaacggaccgctatccagaaggccgtctcagaagggtacaaggatttcagggcaattgctatcgccagtgacatgcaagatgattttatctctccatgtggggcctgcaggcaagtcatgagagagtttggcaccaactggcccgtgtacatgaccaagccggatggtacgtatatt

SEQ ID NO: 714 - DNA, 1278 bp, synthetic construct
  source 1..1278: mol_type = other DNA
gacatccagatgacccagtctccatcttccgtgtctgcatctgtaggagacagagtcaccatcacttgtcgggcgagtcagggtattagcagctggttagcctggtatcagcagaaaccagggaaagcccctaagctcctgatctatgctgcatccagtttgcaaagtggggtcccatcaaggttcagcggcagtggatctgggacagatttcactctcaccatcagcagcctgcagcctgaagattttgcaacttattactgtcagcaaacaaatagtttcccttacacttttggcggagggaccaaggttgagatcaaaggagggggcggatcaggcggaggtggatcgggagggggtggtagcgaggtgcagctgttggagtctgggggaggcttggtacagcctggggggtccctgagactctcctgtgcagcctctggattcacctttagcaattatgccatgagctgggtccgccaggctccagggaaggggctggagtgggtctcagctattagtggtagtggtggtagcacatactacgcagactccgtgaagggccggttcaccatctccagagacaattccaagaacacgctgtatctgcaaatgaacagcctgagagccgaggacacggcggtgtactactgcgccaagggccctcctacataccacacaaactactactacatggacgtatggggcaagggtacaactgtcaccgtctcctcaggtggaggcggttcgggtggagggggatctggtggcggaggtagcggtggcgggggatcaggtggcgggggatcaggtggcgggggatcaggtggcgggggatcaggtggcgggggatcaggtggcgggggatcacccgctgctctgctgcctgcccggggtaccaacatggcccagaagcgtcctgcctgcaccctgaagcctgagtgtgtccagcagctgctggtttgctcccaggaggccaagaagtcagcctactgcccctacagtcactttcctgtgggggctgccctgctcacccaggaggggagaatcttcaaagggtgcaacatagaaaatgcctgctacccgctgggcatctgtgctgaacggaccgctatccagaaggccgtctcagaagggtacaaggatttcagggcaattgctatcgccagtgacatgcaagatgattttatctctccatgtggggcctgcaggcaagtcatgagagagtttggcaccaactggcccgtgtacatgaccaagccggatggtacgtatatt

SEQ ID NO: 715 - DNA, 1293 bp, synthetic construct
  source 1..1293: mol_type = other DNA
gacatccagatgacccagtctccatcttccgtgtctgcatctgtaggagacagagtcaccatcacttgtcgggcgagtcagggtattagcagctggttagcctggtatcagcagaaaccagggaaagcccctaagctcctgatctatgctgcatccagtttgcaaagtggggtcccatcaaggttcagcggcagtggatctgggacagatttcactctcaccatcagcagcctgcagcctgaagattttgcaacttattactgtcagcaaacaaatagtttcccttacacttttggcggagggaccaaggttgagatcaaaggagggggcggatcaggcggaggtggatcgggagggggtggtagcgaggtgcagctgttggagtctgggggaggcttggtacagcctggggggtccctgagactctcctgtgcagcctctggattcacctttagcaattatgccatgagctgggtccgccaggctccagggaaggggctggagtgggtctcagctattagtggtagtggtggtagcacatactacgcagactccgtgaagggccggttcaccatctccagagacaattccaagaacacgctgtatctgcaaatgaacagcctgagagccgaggacacggcggtgtactactgcgccaagggccctcctacataccacacaaactactactacatggacgtatggggcaagggtacaactgtcaccgtctcctcaggtggaggcggttcgggtggagggggatctggtggcggaggtagcggtggcgggggatcaggtggcgggggatcaggtggcgggggatcaggtggcgggggatcaggtggcgggggatcaggtggcgggggatcaggtggcgggggatcacccgctgctctgctgcctgcccggggtaccaacatggcccagaagcgtcctgcctgcaccctgaagcctgagtgtgtccagcagctgctggtttgctcccaggaggccaagaagtcagcctactgcccctacagtcactttcctgtgggggctgccctgctcacccaggaggggagaatcttcaaagggtgcaacatagaaaatgcctgctacccgctgggcatctgtgctgaacggaccgctatccagaaggccgtctcagaagggtacaaggatttcagggcaattgctatcgccagtgacatgcaagatgattttatctctccatgtggggcctgcaggcaagtcatgagagagtttggcaccaactggcccgtgtacatgaccaagccggatggtacgtatatt

SEQ ID NO: 716 - DNA, 1308 bp, synthetic construct
  source 1..1308: mol_type = other DNA
gacatccagatgacccagtctccatcttccgtgtctgcatctgtaggagacagagtcaccatcacttgtcgggcgagtcagggtattagcagctggttagcctggtatcagcagaaaccagggaaagcccctaagctcctgatctatgctgcatccagtttgcaaagtggggtcccatcaaggttcagcggcagtggatctgggacagatttcactctcaccatcagcagcctgcagcctgaagattttgcaacttattactgtcagcaaacaaatagtttcccttacacttttggcggagggaccaaggttgagatcaaaggagggggcggatcaggcggaggtggatcgggagggggtggtagcgaggtgcagctgttggagtctgggggaggcttggtacagcctggggggtccctgagactctcctgtgcagcctctggattcacctttagcaattatgccatgagctgggtccgccaggctccagggaaggggctggagtgggtctcagctattagtggtagtggtggtagcacatactacgcagactccgtgaagggccggttcaccatctccagagacaattccaagaacacgctgtatctgcaaatgaacagcctgagagccgaggacacggcggtgtactactgcgccaagggccctcctacataccacacaaactactactacatggacgtatggggcaagggtacaactgtcaccgtctcctcaggtggaggcggttcgggtggagggggatctggtggcggaggtagcggtggcgggggatcaggtggcgggggatcaggtggcgggggatcaggtggcgggggatcaggtggcgggggatcaggtggcgggggatcaggtggcgggggatcaggtggcgggggatcacccgctgctctgctgcctgcccggggtaccaacatggcccagaagcgtcctgcctgcaccctgaagcctgagtgtgtccagcagctgctggtttgctcccaggaggccaagaagtcagcctactgcccctacagtcactttcctgtgggggctgccctgctcacccaggaggggagaatcttcaaagggtgcaacatagaaaatgcctgctacccgctgggcatctgtgctgaacggaccgctatccagaaggccgtctcagaagggtacaaggatttcagggcaattgctatcgccagtgacatgcaagatgattttatctctccatgtggggcctgcaggcaagtcatgagagagtttggcaccaactggcccgtgtacatgaccaagccggatggtacgtatatt

SEQ ID NO: 717 - DNA, 1323 bp, synthetic construct
  source 1..1323: mol_type = other DNA
gacatccagatgacccagtctccatcttccgtgtctgcatctgtaggagacagagtcaccatcacttgtcgggcgagtcagggtattagcagctggttagcctggtatcagcagaaaccagggaaagcccctaagctcctgatctatgctgcatccagtttgcaaagtggggtcccatcaaggttcagcggcagtggatctgggacagatttcactctcaccatcagcagcctgcagcctgaagattttgcaacttattactgtcagcaaacaaatagtttcccttacacttttggcggagggaccaaggttgagatcaaaggagggggcggatcaggcggaggtggatcgggagggggtggtagcgaggtgcagctgttggagtctgggggaggcttggtacagcctggggggtccctgagactctcctgtgcagcctctggattcacctttagcaattatgccatgagctgggtccgccaggctccagggaaggggctggagtgggtctcagctattagtggtagtggtggtagcacatactacgcagactccgtgaagggccggttcaccatctccagagacaattccaagaacacgctgtatctgcaaatgaacagcctgagagccgaggacacggcggtgtactactgcgccaagggccctcctacataccacacaaactactactacatggacgtatggggcaagggtacaactgtcaccgtctcctcaggtggaggcggttcgggtggagggggatctggtggcggaggtagcggtggcgggggatcaggtggcgggggatcaggtggcgggggatcaggtggcgggggatcaggtggcgggggatcaggtggcgggggatcaggtggcgggggatcaggtggcgggggatcaggtggcgggggatcacccgctgctctgctgcctgcccggggtaccaacatggcccagaagcgtcctgcctgcaccctgaagcctgagtgtgtccagcagctgctggtttgctcccaggaggccaagaagtcagcctactgcccctacagtcactttcctgtgggggctgccctgctcacccaggaggggagaatcttcaaagggtgcaacatagaaaatgcctgctacccgctgggcatctgtgctgaacggaccgctatccagaaggccgtctcagaagggtacaaggatttcagggcaattgctatcgccagtgacatgcaagatgattttatctctccatgtggggcctgcaggcaagtcatgagagagtttggcaccaactggcccgtgtacatgaccaagccggatggtacgtatatt

SEQ ID NO: 718 - DNA, 1158 bp, synthetic construct
  source 1..1158: mol_type = other DNA
gacatccagatgacccagtctccatcttccgtgtctgcatctgtaggagacagagtcaccatcacttgtcgggcgagtcagggtattagcagctggttagcctggtatcagcagaaaccagggaaagcccctaagctcctgatctatgctgcatccagtttgcaaagtggggtcccatcaaggttcagcggcagtggatctgggacagatttcactctcaccatcagcagcctgcagcctgaagattttgcaacttattactgtcagcaaacaaatagtttcccttacacttttggcggagggaccaaggttgagatcaaaggagggggcggatcaggcggaggtggatcgggagggggtggtagcgaggtgcagctgttggagtctgggggaggcttggtacagcctggggggtccctgagactctcctgtgcagcctctggattcacctttagcagctatgtcatgatctgggtccgccaggctccagggaaggggctggagtgggtctcaagcattagtggtgacagcgtaacaacatactacgcagactccgtgaagggccggttcaccatctccagagacaattccaagaacacgctgtatctgcaaatgaacagcctgagagccgaggacacggcggtgtactactgcgccaagggccctcctacataccacacaaactactactacatggacgtatggggcaagggtacaactgtcaccgtctcctcaggtggcgggggatcacccgctgctctgctgcctgcccggggtaccaacatggcccagaagcgtcctgcctgcaccctgaagcctgagtgtgtccagcagctgctggtttgctcccaggaggccaagaagtcagcctactgcccctacagtcactttcctgtgggggctgccctgctcacccaggaggggagaatcttcaaagggtgcaacatagaaaatgcctgctacccgctgggcatctgtgctgaacggaccgctatccagaaggccgtctcagaagggtacaaggatttcagggcaattgctatcgccagtgacatgcaagatgattttatctctccatgtggggcctgcaggcaagtcatgagagagtttggcaccaactggcccgtgtacatgaccaagccggatggtacgtatatt

SEQ ID NO: 719 - DNA, 1188 bp, synthetic construct
  source 1..1188: mol_type = other DNA
gacatccagatgacccagtctccatcttccgtgtctgcatctgtaggagacagagtcaccatcacttgtcgggcgagtcagggtattagcagctggttagcctggtatcagcagaaaccagggaaagcccctaagctcctgatctatgctgcatccagtttgcaaagtggggtcccatcaaggttcagcggcagtggatctgggacagatttcactctcaccatcagcagcctgcagcctgaagattttgcaacttattactgtcagcaaacaaatagtttcccttacacttttggcggagggaccaaggttgagatcaaaggagggggcggatcaggcggaggtggatcgggagggggtggtagcgaggtgcagctgttggagtctgggggaggcttggtacagcctggggggtccctgagactctcctgtgcagcctctggattcacctttagcagctatgtcatgatctgggtccgccaggctccagggaaggggctggagtgggtctcaagcattagtggtgacagcgtaacaacatactacgcagactccgtgaagggccggttcaccatctccagagacaattccaagaacacgctgtatctgcaaatgaacagcctgagagccgaggacacggcggtgtactactgcgccaagggccctcctacataccacacaaactactactacatggacgtatggggcaagggtacaactgtcaccgtctcctcaggagggggcggatcaggcggaggtggatcgggagggggtggtagccccgctgctctgctgcctgcccggggtaccaacatggcccagaagcgtcctgcctgcaccctgaagcctgagtgtgtccagcagctgctggtttgctcccaggaggccaagaagtcagcctactgcccctacagtcactttcctgtgggggctgccctgctcacccaggaggggagaatcttcaaagggtgcaacatagaaaatgcctgctacccgctgggcatctgtgctgaacggaccgctatccagaaggccgtctcagaagggtacaaggatttcagggcaattgctatcgccagtgacatgcaagatgattttatctctccatgtggggcctgcaggcaagtcatgagagagtttggcaccaactggcccgtgtacatgaccaagccggatggtacgtatatt

SEQ ID NO: 720 - DNA, 1203 bp, synthetic construct
  source 1..1203: mol_type = other DNA
gacatccagatgacccagtctccatcttccgtgtctgcatctgtaggagacagagtcaccatcacttgtcgggcgagtcagggtattagcagctggttagcctggtatcagcagaaaccagggaaagcccctaagctcctgatctatgctgcatccagtttgcaaagtggggtcccatcaaggttcagcggcagtggatctgggacagatttcactctcaccatcagcagcctgcagcctgaagattttgcaacttattactgtcagcaaacaaatagtttcccttacacttttggcggagggaccaaggttgagatcaaaggagggggcggatcaggcggaggtggatcgggagggggtggtagcgaggtgcagctgttggagtctgggggaggcttggtacagcctggggggtccctgagactctcctgtgcagcctctggattcacctttagcagctatgtcatgatctgggtccgccaggctccagggaaggggctggagtgggtctcaagcattagtggtgacagcgtaacaacatactacgcagactccgtgaagggccggttcaccatctccagagacaattccaagaacacgctgtatctgcaaatgaacagcctgagagccgaggacacggcggtgtactactgcgccaagggccctcctacataccacacaaactactactacatggacgtatggggcaagggtacaactgtcaccgtctcctcaggtggaggcggttcgggtggagggggatctggtggcggaggtagcggtggcgggggatcacccgctgctctgctgcctgcccggggtaccaacatggcccagaagcgtcctgcctgcaccctgaagcctgagtgtgtccagcagctgctggtttgctcccaggaggccaagaagtcagcctactgcccctacagtcactttcctgtgggggctgccctgctcacccaggaggggagaatcttcaaagggtgcaacatagaaaatgcctgctacccgctgggcatctgtgctgaacggaccgctatccagaaggccgtctcagaagggtacaaggatttcagggcaattgctatcgccagtgacatgcaagatgattttatctctccatgtggggcctgcaggcaagtcatgagagagtttggcaccaactggcccgtgtacatgaccaagccggatggtacgtatatt

SEQ ID NO: 721 - DNA, 1218 bp, synthetic construct
  source 1..1218: mol_type = other DNA
gacatccagatgacccagtctccatcttccgtgtctgcatctgtaggagacagagtcaccatcacttgtcgggcgagtcagggtattagcagctggttagcctggtatcagcagaaaccagggaaagcccctaagctcctgatctatgctgcatccagtttgcaaagtggggtcccatcaaggttcagcggcagtggatctgggacagatttcactctcaccatcagcagcctgcagcctgaagattttgcaacttattactgtcagcaaacaaatagtttcccttacacttttggcggagggaccaaggttgagatcaaaggagggggcggatcaggcggaggtggatcgggagggggtggtagcgaggtgcagctgttggagtctgggggaggcttggtacagcctggggggtccctgagactctcctgtgcagcctctggattcacctttagcagctatgtcatgatctgggtccgccaggctccagggaaggggctggagtgggtctcaagcattagtggtgacagcgtaacaacatactacgcagactccgtgaagggccggttcaccatctccagagacaattccaagaacacgctgtatctgcaaatgaacagcctgagagccgaggacacggcggtgtactactgcgccaagggccctcctacataccacacaaactactactacatggacgtatggggcaagggtacaactgtcaccgtctcctcaggtggaggcggttcgggtggagggggatctggtggcggaggtagcggtggcgggggatcaggtggcgggggatcacccgctgctctgctgcctgcccggggtaccaacatggcccagaagcgtcctgcctgcaccctgaagcctgagtgtgtccagcagctgctggtttgctcccaggaggccaagaagtcagcctactgcccctacagtcactttcctgtgggggctgccctgctcacccaggaggggagaatcttcaaagggtgcaacatagaaaatgcctgctacccgctgggcatctgtgctgaacggaccgctatccagaaggccgtctcagaagggtacaaggatttcagggcaattgctatcgccagtgacatgcaagatgattttatctctccatgtggggcctgcaggcaagtcatgagagagtttggcaccaactggcccgtgtacatgaccaagccggatggtacgtatatt

SEQ ID NO: 722 - DNA, 1233 bp, synthetic construct
  source 1..1233: mol_type = other DNA
gacatccagatgacccagtctccatcttccgtgtctgcatctgtaggagacagagtcaccatcacttgtcgggcgagtcagggtattagcagctggttagcctggtatcagcagaaaccagggaaagcccctaagctcctgatctatgctgcatccagtttgcaaagtggggtcccatcaaggttcagcggcagtggatctgggacagatttcactctcaccatcagcagcctgcagcctgaagattttgcaacttattactgtcagcaaacaaatagtttcccttacacttttggcggagggaccaaggttgagatcaaaggagggggcggatcaggcggaggtggatcgggagggggtggtagcgaggtgcagctgttggagtctgggggaggcttggtacagcctggggggtccctgagactctcctgtgcagcctctggattcacctttagcagctatgtcatgatctgggtccgccaggctccagggaaggggctggagtgggtctcaagcattagtggtgacagcgtaacaacatactacgcagactccgtgaagggccggttcaccatctccagagacaattccaagaacacgctgtatctgcaaatgaacagcctgagagccgaggacacggcggtgtactactgcgccaagggccctcctacataccacacaaactactactacatggacgtatggggcaagggtacaactgtcaccgtctcctcaggtggaggcggttcgggtggagggggatctggtggcggaggtagcggtggcgggggatcaggtggcgggggatcaggtggcgggggatcacccgctgctctgctgcctgcccggggtaccaacatggcccagaagcgtcctgcctgcaccctgaagcctgagtgtgtccagcagctgctggtttgctcccaggaggccaagaagtcagcctactgcccctacagtcactttcctgtgggggctgccctgctcacccaggaggggagaatcttcaaagggtgcaacatagaaaatgcctgctacccgctgggcatctgtgctgaacggaccgctatccagaaggccgtctcagaagggtacaaggatttcagggcaattgctatcgccagtgacatgcaagatgattttatctctccatgtggggcctgcaggcaagtcatgagagagtttggcaccaactggcccgtgtacatgaccaagccggatggtacgtatatt

SEQ ID NO: 723 - DNA, 1248 bp, synthetic construct
  source 1..1248: mol_type = other DNA
gacatccagatgacccagtctccatcttccgtgtctgcatctgtaggagacagagtcaccatcacttgtcgggcgagtcagggtattagcagctggttagcctggtatcagcagaaaccagggaaagcccctaagctcctgatctatgctgcatccagtttgcaaagtggggtcccatcaaggttcagcggcagtggatctgggacagatttcactctcaccatcagcagcctgcagcctgaagattttgcaacttattactgtcagcaaacaaatagtttcccttacacttttggcggagggaccaaggttgagatcaaaggagggggcggatcaggcggaggtggatcgggagggggtggtagcgaggtgcagctgttggagtctgggggaggcttggtacagcctggggggtccctgagactctcctgtgcagcctctggattcacctttagcagctatgtcatgatctgggtccgccaggctccagggaaggggctggagtgggtctcaagcattagtggtgacagcgtaacaacatactacgcagactccgtgaagggccggttcaccatctccagagacaattccaagaacacgctgtatctgcaaatgaacagcctgagagccgaggacacggcggtgtactactgcgccaagggccctcctacataccacacaaactactactacatggacgtatggggcaagggtacaactgtcaccgtctcctcaggtggaggcggttcgggtggagggggatctggtggcggaggtagcggtggcgggggatcaggtggcgggggatcaggtggcgggggatcaggtggcgggggatcacccgctgctctgctgcctgcccggggtaccaacatggcccagaagcgtcctgcctgcaccctgaagcctgagtgtgtccagcagctgctggtttgctcccaggaggccaagaagtcagcctactgcccctacagtcactttcctgtgggggctgccctgctcacccaggaggggagaatcttcaaagggtgcaacatagaaaatgcctgctacccgctgggcatctgtgctgaacggaccgctatccagaaggccgtctcagaagggtacaaggatttcagggcaattgctatcgccagtgacatgcaagatgattttatctctccatgtggggcctgcaggcaagtcatgagagagtttggcaccaactggcccgtgtacatgaccaagccggatggtacgtatatt

SEQ ID NO: 724 - DNA, 1263 bp, synthetic construct
  source 1..1263: mol_type = other DNA
gacatccagatgacccagtctccatcttccgtgtctgcatctgtaggagacagagtcaccatcacttgtcgggcgagtcagggtattagcagctggttagcctggtatcagcagaaaccagggaaagcccctaagctcctgatctatgctgcatccagtttgcaaagtggggtcccatcaaggttcagcggcagtggatctgggacagatttcactctcaccatcagcagcctgcagcctgaagattttgcaacttattactgtcagcaaacaaatagtttcccttacacttttggcggagggaccaaggttgagatcaaaggagggggcggatcaggcggaggtggatcgggagggggtggtagcgaggtgcagctgttggagtctgggggaggcttggtacagcctggggggtccctgagactctcctgtgcagcctctggattcacctttagcagctatgtcatgatctgggtccgccaggctccagggaaggggctggagtgggtctcaagcattagtggtgacagcgtaacaacatactacgcagactccgtgaagggccggttcaccatctccagagacaattccaagaacacgctgtatctgcaaatgaacagcctgagagccgaggacacggcggtgtactactgcgccaagggccctcctacataccacacaaactactactacatggacgtatggggcaagggtacaactgtcaccgtctcctcaggtggaggcggttcgggtggagggggatctggtggcggaggtagcggtggcgggggatcaggtggcgggggatcaggtggcgggggatcaggtggcgggggatcaggtggcgggggatcacccgctgctctgctgcctgcccggggtaccaacatggcccagaagcgtcctgcctgcaccctgaagcctgagtgtgtccagcagctgctggtttgctcccaggaggccaagaagtcagcctactgcccctacagtcactttcctgtgggggctgccctgctcacccaggaggggagaatcttcaaagggtgcaacatagaaaatgcctgctacccgctgggcatctgtgctgaacggaccgctatccagaaggccgtctcagaagggtacaaggatttcagggcaattgctatcgccagtgacatgcaagatgattttatctctccatgtggggcctgcaggcaagtcatgagagagtttggcaccaactggcccgtgtacatgaccaagccggatggtacgtatatt

SEQ ID NO: 725 - DNA, 1278 bp, synthetic construct
  source 1..1278: mol_type = other DNA
gacatccagatgacccagtctccatcttccgtgtctgcatctgtaggagacagagtcaccatcacttgtcgggcgagtcagggtattagcagctggttagcctggtatcagcagaaaccagggaaagcccctaagctcctgatctatgctgcatccagtttgcaaagtggggtcccatcaaggttcagcggcagtggatctgggacagatttcactctcaccatcagcagcctgcagcctgaagattttgcaacttattactgtcagcaaacaaatagtttcccttacacttttggcggagggaccaaggttgagatcaaaggagggggcggatcaggcggaggtggatcgggagggggtggtagcgaggtgcagctgttggagtctgggggaggcttggtacagcctggggggtccctgagactctcctgtgcagcctctggattcacctttagcagctatgtcatgatctgggtccgccaggctccagggaaggggctggagtgggtctcaagcattagtggtgacagcgtaacaacatactacgcagactccgtgaagggccggttcaccatctccagagacaattccaagaacacgctgtatctgcaaatgaacagcctgagagccgaggacacggcggtgtactactgcgccaagggccctcctacataccacacaaactactactacatggacgtatggggcaagggtacaactgtcaccgtctcctcaggtggaggcggttcgggtggagggggatctggtggcggaggtagcggtggcgggggatcaggtggcgggggatcaggtggcgggggatcaggtggcgggggatcaggtggcgggggatcaggtggcgggggatcacccgctgctctgctgcctgcccggggtaccaacatggcccagaagcgtcctgcctgcaccctgaagcctgagtgtgtccagcagctgctggtttgctcccaggaggccaagaagtcagcctactgcccctacagtcactttcctgtgggggctgccctgctcacccaggaggggagaatcttcaaagggtgcaacatagaaaatgcctgctacccgctgggcatctgtgctgaacggaccgctatccagaaggccgtctcagaagggtacaaggatttcagggcaattgctatcgccagtgacatgcaagatgattttatctctccatgtggggcctgcaggcaagtcatgagagagtttggcaccaactggcccgtgtacatgaccaagccggatggtacgtatatt

SEQ ID NO: 726 - DNA, 1293 bp, synthetic construct
  source 1..1293: mol_type = other DNA
gacatccagatgacccagtctccatcttccgtgtctgcatctgtaggagacagagtcaccatcacttgtcgggcgagtcagggtattagcagctggttagcctggtatcagcagaaaccagggaaagcccctaagctcctgatctatgctgcatccagtttgcaaagtggggtcccatcaaggttcagcggcagtggatctgggacagatttcactctcaccatcagcagcctgcagcctgaagattttgcaacttattactgtcagcaaacaaatagtttcccttacacttttggcggagggaccaaggttgagatcaaaggagggggcggatcaggcggaggtggatcgggagggggtggtagcgaggtgcagctgttggagtctgggggaggcttggtacagcctggggggtccctgagactctcctgtgcagcctctggattcacctttagcagctatgtcatgatctgggtccgccaggctccagggaaggggctggagtgggtctcaagcattagtggtgacagcgtaacaacatactacgcagactccgtgaagggccggttcaccatctccagagacaattccaagaacacgctgtatctgcaaatgaacagcctgagagccgaggacacggcggtgtactactgcgccaagggccctcctacataccacacaaactactactacatggacgtatggggcaagggtacaactgtcaccgtctcctcaggtggaggcggttcgggtggagggggatctggtggcggaggtagcggtggcgggggatcaggtggcgggggatcaggtggcgggggatcaggtggcgggggatcaggtggcgggggatcaggtggcgggggatcaggtggcgggggatcacccgctgctctgctgcctgcccggggtaccaacatggcccagaagcgtcctgcctgcaccctgaagcctgagtgtgtccagcagctgctggtttgctcccaggaggccaagaagtcagcctactgcccctacagtcactttcctgtgggggctgccctgctcacccaggaggggagaatcttcaaagggtgcaacatagaaaatgcctgctacccgctgggcatctgtgctgaacggaccgctatccagaaggccgtctcagaagggtacaaggatttcagggcaattgctatcgccagtgacatgcaagatgattttatctctccatgtggggcctgcaggcaagtcatgagagagtttggcaccaactggcccgtgtacatgaccaagccggatggtacgtatatt

SEQ ID NO: 727 - DNA, 1308 bp, synthetic construct
  source 1..1308: mol_type = other DNA
gacatccagatgacccagtctccatcttccgtgtctgcatctgtaggagacagagtcaccatcacttgtcgggcgagtcagggtattagcagctggttagcctggtatcagcagaaaccagggaaagcccctaagctcctgatctatgctgcatccagtttgcaaagtggggtcccatcaaggttcagcggcagtggatctgggacagatttcactctcaccatcagcagcctgcagcctgaagattttgcaacttattactgtcagcaaacaaatagtttcccttacacttttggcggagggaccaaggttgagatcaaaggagggggcggatcaggcggaggtggatcgggagggggtggtagcgaggtgcagctgttggagtctgggggaggcttggtacagcctggggggtccctgagactctcctgtgcagcctctggattcacctttagcagctatgtcatgatctgggtccgccaggctccagggaaggggctggagtgggtctcaagcattagtggtgacagcgtaacaacatactacgcagactccgtgaagggccggttcaccatctccagagacaattccaagaacacgctgtatctgcaaatgaacagcctgagagccgaggacacggcggtgtactactgcgccaagggccctcctacataccacacaaactactactacatggacgtatggggcaagggtacaactgtcaccgtctcctcaggtggaggcggttcgggtggagggggatctggtggcggaggtagcggtggcgggggatcaggtggcgggggatcaggtggcgggggatcaggtggcgggggatcaggtggcgggggatcaggtggcgggggatcaggtggcgggggatcaggtggcgggggatcacccgctgctctgctgcctgcccggggtaccaacatggcccagaagcgtcctgcctgcaccctgaagcctgagtgtgtccagcagctgctggtttgctcccaggaggccaagaagtcagcctactgcccctacagtcactttcctgtgggggctgccctgctcacccaggaggggagaatcttcaaagggtgcaacatagaaaatgcctgctacccgctgggcatctgtgctgaacggaccgctatccagaaggccgtctcagaagggtacaaggatttcagggcaattgctatcgccagtgacatgcaagatgattttatctctccatgtggggcctgcaggcaagtcatgagagagtttggcaccaactggcccgtgtacatgaccaagccggatggtacgtatatt

SEQ ID NO: 728 - DNA, 1323 bp, synthetic construct
  source 1..1323: mol_type = other DNA
gacatccagatgacccagtctccatcttccgtgtctgcatctgtaggagacagagtcaccatcacttgtcgggcgagtcagggtattagcagctggttagcctggtatcagcagaaaccagggaaagcccctaagctcctgatctatgctgcatccagtttgcaaagtggggtcccatcaaggttcagcggcagtggatctgggacagatttcactctcaccatcagcagcctgcagcctgaagattttgcaacttattactgtcagcaaacaaatagtttcccttacacttttggcggagggaccaaggttgagatcaaaggagggggcggatcaggcggaggtggatcgggagggggtggtagcgaggtgcagctgttggagtctgggggaggcttggtacagcctggggggtccctgagactctcctgtgcagcctctggattcacctttagcagctatgtcatgatctgggtccgccaggctccagggaaggggctggagtgggtctcaagcattagtggtgacagcgtaacaacatactacgcagactccgtgaagggccggttcaccatctccagagacaattccaagaacacgctgtatctgcaaatgaacagcctgagagccgaggacacggcggtgtactactgcgccaagggccctcctacataccacacaaactactactacatggacgtatggggcaagggtacaactgtcaccgtctcctcaggtggaggcggttcgggtggagggggatctggtggcggaggtagcggtggcgggggatcaggtggcgggggatcaggtggcgggggatcaggtggcgggggatcaggtggcgggggatcaggtggcgggggatcaggtggcgggggatcaggtggcgggggatcaggtggcgggggatcacccgctgctctgctgcctgcccggggtaccaacatggcccagaagcgtcctgcctgcaccctgaagcctgagtgtgtccagcagctgctggtttgctcccaggaggccaagaagtcagcctactgcccctacagtcactttcctgtgggggctgccctgctcacccaggaggggagaatcttcaaagggtgcaacatagaaaatgcctgctacccgctgggcatctgtgctgaacggaccgctatccagaaggccgtctcagaagggtacaaggatttcagggcaattgctatcgccagtgacatgcaagatgattttatctctccatgtggggcctgcaggcaagtcatgagagagtttggcaccaactggcccgtgtacatgaccaagccggatggtacgtatatt

SEQ ID NO: 729 - DNA, 1152 bp, synthetic construct
  source 1..1152: mol_type = other DNA
gacatccagatgacccagtctccatcctccctgtctgcatctgtaggagacagagtcaccatcacttgccgggcaagtcagagcattagcagctatttaaattggtatcagcagaaaccagggaaagcccctaagctcctgatctatgctgcatccagtttgcaaagtggggtcccatcaaggttcagtggcagtggatctgggacagatttcactctcaccatcagcagtctgcaacctgaagattttgcaacttactactgtcagcaaagctacatcgccccttacacttttggcggagggaccaaggttgagatcaaaggagggggcggatcaggcggaggtggatcgggagggggtggtagcgaggtgcagctggtggagtctgggggaggcttggtccagcctggagggtccctgagactctcctgtgcagcctctggattcaccttcagtgaccactacatggactgggtccgccaggctccagggaaggggctggagtgggttggccgtactagaaacaaagctagtagttacaccacagaatacgccgcgtctgtgaaaggcagattcaccatctcaagagatgattcaaagaactcactgtatctgcaaatgaacagcctgaaaaccgaggacacggcggtgtactactgcgccagagagcctaaatactggatcgacttcgacctatgggggagaggtaccttggtcaccgtctcctcaggtggcgggggatcacccgctgctctgctgcctgcccggggtaccaacatggcccagaagcgtcctgcctgcaccctgaagcctgagtgtgtccagcagctgctggtttgctcccaggaggccaagaagtcagcctactgcccctacagtcactttcctgtgggggctgccctgctcacccaggaggggagaatcttcaaagggtgcaacatagaaaatgcctgctacccgctgggcatctgtgctgaacggaccgctatccagaaggccgtctcagaagggtacaaggatttcagggcaattgctatcgccagtgacatgcaagatgattttatctctccatgtggggcctgcaggcaagtcatgagagagtttggcaccaactggcccgtgtacatgaccaagccggatggtacgtatatt

SEQ ID NO: 730 - DNA, 1182 bp, synthetic construct
  source 1..1182: mol_type = other DNA
gacatccagatgacccagtctccatcctccctgtctgcatctgtaggagacagagtcaccatcacttgccgggcaagtcagagcattagcagctatttaaattggtatcagcagaaaccagggaaagcccctaagctcctgatctatgctgcatccagtttgcaaagtggggtcccatcaaggttcagtggcagtggatctgggacagatttcactctcaccatcagcagtctgcaacctgaagattttgcaacttactactgtcagcaaagctacatcgccccttacacttttggcggagggaccaaggttgagatcaaaggagggggcggatcaggcggaggtggatcgggagggggtggtagcgaggtgcagctggtggagtctgggggaggcttggtccagcctggagggtccctgagactctcctgtgcagcctctggattcaccttcagtgaccactacatggactgggtccgccaggctccagggaaggggctggagtgggttggccgtactagaaacaaagctagtagttacaccacagaatacgccgcgtctgtgaaaggcagattcaccatctcaagagatgattcaaagaactcactgtatctgcaaatgaacagcctgaaaaccgaggacacggcggtgtactactgcgccagagagcctaaatactggatcgacttcgacctatgggggagaggtaccttggtcaccgtctcctcaggagggggcggatcaggcggaggtggatcgggagggggtggtagccccgctgctctgctgcctgcccggggtaccaacatggcccagaagcgtcctgcctgcaccctgaagcctgagtgtgtccagcagctgctggtttgctcccaggaggccaagaagtcagcctactgcccctacagtcactttcctgtgggggctgccctgctcacccaggaggggagaatcttcaaagggtgcaacatagaaaatgcctgctacccgctgggcatctgtgctgaacggaccgctatccagaaggccgtctcagaagggtacaaggatttcagggcaattgctatcgccagtgacatgcaagatgattttatctctccatgtggggcctgcaggcaagtcatgagagagtttggcaccaactggcccgtgtacatgaccaagccggatggtacgtatatt

SEQ ID NO: 731 - DNA, 1197 bp, synthetic construct
  source 1..1197: mol_type = other DNA
gacatccagatgacccagtctccatcctccctgtctgcatctgtaggagacagagtcaccatcacttgccgggcaagtcagagcattagcagctatttaaattggtatcagcagaaaccagggaaagcccctaagctcctgatctatgctgcatccagtttgcaaagtggggtcccatcaaggttcagtggcagtggatctgggacagatttcactctcaccatcagcagtctgcaacctgaagattttgcaacttactactgtcagcaaagctacatcgccccttacacttttggcggagggaccaaggttgagatcaaaggagggggcggatcaggcggaggtggatcgggagggggtggtagcgaggtgcagctggtggagtctgggggaggcttggtccagcctggagggtccctgagactctcctgtgcagcctctggattcaccttcagtgaccactacatggactgggtccgccaggctccagggaaggggctggagtgggttggccgtactagaaacaaagctagtagttacaccacagaatacgccgcgtctgtgaaaggcagattcaccatctcaagagatgattcaaagaactcactgtatctgcaaatgaacagcctgaaaaccgaggacacggcggtgtactactgcgccagagagcctaaatactggatcgacttcgacctatgggggagaggtaccttggtcaccgtctcctcaggtggaggcggttcgggtggagggggatctggtggcggaggtagcggtggcgggggatcacccgctgctctgctgcctgcccggggtaccaacatggcccagaagcgtcctgcctgcaccctgaagcctgagtgtgtccagcagctgctggtttgctcccaggaggccaagaagtcagcctactgcccctacagtcactttcctgtgggggctgccctgctcacccaggaggggagaatcttcaaagggtgcaacatagaaaatgcctgctacccgctgggcatctgtgctgaacggaccgctatccagaaggccgtctcagaagggtacaaggatttcagggcaattgctatcgccagtgacatgcaagatgattttatctctccatgtggggcctgcaggcaagtcatgagagagtttggcaccaactggcccgtgtacatgaccaagccggatggtacgtatatt

SEQ ID NO: 732 - DNA, 1212 bp, synthetic construct
  source 1..1212: mol_type = other DNA
gacatccagatgacccagtctccatcctccctgtctgcatctgtaggagacagagtcaccatcacttgccgggcaagtcagagcattagcagctatttaaattggtatcagcagaaaccagggaaagcccctaagctcctgatctatgctgcatccagtttgcaaagtggggtcccatcaaggttcagtggcagtggatctgggacagatttcactctcaccatcagcagtctgcaacctgaagattttgcaacttactactgtcagcaaagctacatcgccccttacacttttggcggagggaccaaggttgagatcaaaggagggggcggatcaggcggaggtggatcgggagggggtggtagcgaggtgcagctggtggagtctgggggaggcttggtccagcctggagggtccctgagactctcctgtgcagcctctggattcaccttcagtgaccactacatggactgggtccgccaggctccagggaaggggctggagtgggttggccgtactagaaacaaagctagtagttacaccacagaatacgccgcgtctgtgaaaggcagattcaccatctcaagagatgattcaaagaactcactgtatctgcaaatgaacagcctgaaaaccgaggacacggcggtgtactactgcgccagagagcctaaatactggatcgacttcgacctatgggggagaggtaccttggtcaccgtctcctcaggtggaggcggttcgggtggagggggatctggtggcggaggtagcggtggcgggggatcaggtggcgggggatcacccgctgctctgctgcctgcccggggtaccaacatggcccagaagcgtcctgcctgcaccctgaagcctgagtgtgtccagcagctgctggtttgctcccaggaggccaagaagtcagcctactgcccctacagtcactttcctgtgggggctgccctgctcacccaggaggggagaatcttcaaagggtgcaacatagaaaatgcctgctacccgctgggcatctgtgctgaacggaccgctatccagaaggccgtctcagaagggtacaaggatttcagggcaattgctatcgccagtgacatgcaagatgattttatctctccatgtggggcctgcaggcaagtcatgagagagtttggcaccaactggcccgtgtacatgaccaagccggatggtacgtatatt

SEQ ID NO: 733 - DNA, 1227 bp, synthetic construct
  source 1..1227: mol_type = other DNA
gacatccagatgacccagtctccatcctccctgtctgcatctgtaggagacagagtcaccatcacttgccgggcaagtcagagcattagcagctatttaaattggtatcagcagaaaccagggaaagcccctaagctcctgatctatgctgcatccagtttgcaaagtggggtcccatcaaggttcagtggcagtggatctgggacagatttcactctcaccatcagcagtctgcaacctgaagattttgcaacttactactgtcagcaaagctacatcgccccttacacttttggcggagggaccaaggttgagatcaaaggagggggcggatcaggcggaggtggatcgggagggggtggtagcgaggtgcagctggtggagtctgggggaggcttggtccagcctggagggtccctgagactctcctgtgcagcctctggattcaccttcagtgaccactacatggactgggtccgccaggctccagggaaggggctggagtgggttggccgtactagaaacaaagctagtagttacaccacagaatacgccgcgtctgtgaaaggcagattcaccatctcaagagatgattcaaagaactcactgtatctgcaaatgaacagcctgaaaaccgaggacacggcggtgtactactgcgccagagagcctaaatactggatcgacttcgacctatgggggagaggtaccttggtcaccgtctcctcaggtggaggcggttcgggtggagggggatctggtggcggaggtagcggtggcgggggatcaggtggcgggggatcaggtggcgggggatcacccgctgctctgctgcctgcccggggtaccaacatggcccagaagcgtcctgcctgcaccctgaagcctgagtgtgtccagcagctgctggtttgctcccaggaggccaagaagtcagcctactgcccctacagtcactttcctgtgggggctgccctgctcacccaggaggggagaatcttcaaagggtgcaacatagaaaatgcctgctacccgctgggcatctgtgctgaacggaccgctatccagaaggccgtctcagaagggtacaaggatttcagggcaattgctatcgccagtgacatgcaagatgattttatctctccatgtggggcctgcaggcaagtcatgagagagtttggcaccaactggcccgtgtacatgaccaagccggatggtacgtatatt

SEQ ID NO: 734 - DNA, 1242 bp, synthetic construct
  source 1..1242: mol_type = other DNA
gacatccagatgacccagtctccatcctccctgtctgcatctgtaggagacagagtcaccatcacttgccgggcaagtcagagcattagcagctatttaaattggtatcagcagaaaccagggaaagcccctaagctcctgatctatgctgcatccagtttgcaaagtggggtcccatcaaggttcagtggcagtggatctgggacagatttcactctcaccatcagcagtctgcaacctgaagattttgcaacttactactgtcagcaaagctacatcgccccttacacttttggcggagggaccaaggttgagatcaaaggagggggcggatcaggcggaggtggatcgggagggggtggtagcgaggtgcagctggtggagtctgggggaggcttggtccagcctggagggtccctgagactctcctgtgcagcctctggattcaccttcagtgaccactacatggactgggtccgccaggctccagggaaggggctggagtgggttggccgtactagaaacaaagctagtagttacaccacagaatacgccgcgtctgtgaaaggcagattcaccatctcaagagatgattcaaagaactcactgtatctgcaaatgaacagcctgaaaaccgaggacacggcggtgtactactgcgccagagagcctaaatactggatcgacttcgacctatgggggagaggtaccttggtcaccgtctcctcaggtggaggcggttcgggtggagggggatctggtggcggaggtagcggtggcgggggatcaggtggcgggggatcaggtggcgggggatcaggtggcgggggatcacccgctgctctgctgcctgcccggggtaccaacatggcccagaagcgtcctgcctgcaccctgaagcctgagtgtgtccagcagctgctggtttgctcccaggaggccaagaagtcagcctactgcccctacagtcactttcctgtgggggctgccctgctcacccaggaggggagaatcttcaaagggtgcaacatagaaaatgcctgctacccgctgggcatctgtgctgaacggaccgctatccagaaggccgtctcagaagggtacaaggatttcagggcaattgctatcgccagtgacatgcaagatgattttatctctccatgtggggcctgcaggcaagtcatgagagagtttggcaccaactggcccgtgtacatgaccaagccggatggtacgtatatt

SEQ ID NO: 735 - DNA, 1257 bp, synthetic construct
  source 1..1257: mol_type = other DNA
gacatccagatgacccagtctccatcctccctgtctgcatctgtaggagacagagtcaccatcacttgccgggcaagtcagagcattagcagctatttaaattggtatcagcagaaaccagggaaagcccctaagctcctgatctatgctgcatccagtttgcaaagtggggtcccatcaaggttcagtggcagtggatctgggacagatttcactctcaccatcagcagtctgcaacctgaagattttgcaacttactactgtcagcaaagctacatcgccccttacacttttggcggagggaccaaggttgagatcaaaggagggggcggatcaggcggaggtggatcgggagggggtggtagcgaggtgcagctggtggagtctgggggaggcttggtccagcctggagggtccctgagactctcctgtgcagcctctggattcaccttcagtgaccactacatggactgggtccgccaggctccagggaaggggctggagtgggttggccgtactagaaacaaagctagtagttacaccacagaatacgccgcgtctgtgaaaggcagattcaccatctcaagagatgattcaaagaactcactgtatctgcaaatgaacagcctgaaaaccgaggacacggcggtgtactactgcgccagagagcctaaatactggatcgacttcgacctatgggggagaggtaccttggtcaccgtctcctcaggtggaggcggttcgggtggagggggatctggtggcggaggtagcggtggcgggggatcaggtggcgggggatcaggtggcgggggatcaggtggcgggggatcaggtggcgggggatcacccgctgctctgctgcctgcccggggtaccaacatggcccagaagcgtcctgcctgcaccctgaagcctgagtgtgtccagcagctgctggtttgctcccaggaggccaagaagtcagcctactgcccctacagtcactttcctgtgggggctgccctgctcacccaggaggggagaatcttcaaagggtgcaacatagaaaatgcctgctacccgctgggcatctgtgctgaacggaccgctatccagaaggccgtctcagaagggtacaaggatttcagggcaattgctatcgccagtgacatgcaagatgattttatctctccatgtggggcctgcaggcaagtcatgagagagtttggcaccaactggcccgtgtacatgaccaagccggatggtacgtatatt

SEQ ID NO: 736 - DNA, 1272 bp, synthetic construct
  source 1..1272: mol_type = other DNA
gacatccagatgacccagtctccatcctccctgtctgcatctgtaggagacagagtcaccatcacttgccgggcaagtcagagcattagcagctatttaaattggtatcagcagaaaccagggaaagcccctaagctcctgatctatgctgcatccagtttgcaaagtggggtcccatcaaggttcagtggcagtggatctgggacagatttcactctcaccatcagcagtctgcaacctgaagattttgcaacttactactgtcagcaaagctacatcgccccttacacttttggcggagggaccaaggttgagatcaaaggagggggcggatcaggcggaggtggatcgggagggggtggtagcgaggtgcagctggtggagtctgggggaggcttggtccagcctggagggtccctgagactctcctgtgcagcctctggattcaccttcagtgaccactacatggactgggtccgccaggctccagggaaggggctggagtgggttggccgtactagaaacaaagctagtagttacaccacagaatacgccgcgtctgtgaaaggcagattcaccatctcaagagatgattcaaagaactcactgtatctgcaaatgaacagcctgaaaaccgaggacacggcggtgtactactgcgccagagagcctaaatactggatcgacttcgacctatgggggagaggtaccttggtcaccgtctcctcaggtggaggcggttcgggtggagggggatctggtggcggaggtagcggtggcgggggatcaggtggcgggggatcaggtggcgggggatcaggtggcgggggatcaggtggcgggggatcaggtggcgggggatcacccgctgctctgctgcctgcccggggtaccaacatggcccagaagcgtcctgcctgcaccctgaagcctgagtgtgtccagcagctgctggtttgctcccaggaggccaagaagtcagcctactgcccctacagtcactttcctgtgggggctgccctgctcacccaggaggggagaatcttcaaagggtgcaacatagaaaatgcctgctacccgctgggcatctgtgctgaacggaccgctatccagaaggccgtctcagaagggtacaaggatttcagggcaattgctatcgccagtgacatgcaagatgattttatctctccatgtggggcctgcaggcaagtcatgagagagtttggcaccaactggcccgtgtacatgaccaagccggatggtacgtatatt

SEQ ID NO: 737 - DNA, 1287 bp, synthetic construct
  source 1..1287: mol_type = other DNA
gacatccagatgacccagtctccatcctccctgtctgcatctgtaggagacagagtcaccatcacttgccgggcaagtcagagcattagcagctatttaaattggtatcagcagaaaccagggaaagcccctaagctcctgatctatgctgcatccagtttgcaaagtggggtcccatcaaggttcagtggcagtggatctgggacagatttcactctcaccatcagcagtctgcaacctgaagattttgcaacttactactgtcagcaaagctacatcgccccttacacttttggcggagggaccaaggttgagatcaaaggagggggcggatcaggcggaggtggatcgggagggggtggtagcgaggtgcagctggtggagtctgggggaggcttggtccagcctggagggtccctgagactctcctgtgcagcctctggattcaccttcagtgaccactacatggactgggtccgccaggctccagggaaggggctggagtgggttggccgtactagaaacaaagctagtagttacaccacagaatacgccgcgtctgtgaaaggcagattcaccatctcaagagatgattcaaagaactcactgtatctgcaaatgaacagcctgaaaaccgaggacacggcggtgtactactgcgccagagagcctaaatactggatcgacttcgacctatgggggagaggtaccttggtcaccgtctcctcaggtggaggcggttcgggtggagggggatctggtggcggaggtagcggtggcgggggatcaggtggcgggggatcaggtggcgggggatcaggtggcgggggatcaggtggcgggggatcaggtggcgggggatcaggtggcgggggatcacccgctgctctgctgcctgcccggggtaccaacatggcccagaagcgtcctgcctgcaccctgaagcctgagtgtgtccagcagctgctggtttgctcccaggaggccaagaagtcagcctactgcccctacagtcactttcctgtgggggctgccctgctcacccaggaggggagaatcttcaaagggtgcaacatagaaaatgcctgctacccgctgggcatctgtgctgaacggaccgctatccagaaggccgtctcagaagggtacaaggatttcagggcaattgctatcgccagtgacatgcaagatgattttatctctccatgtggggcctgcaggcaagtcatgagagagtttggcaccaactggcccgtgtacatgaccaagccggatggtacgtatatt

SEQ ID NO: 738 - DNA, 1302 bp, synthetic construct
  source 1..1302: mol_type = other DNA
gacatccagatgacccagtctccatcctccctgtctgcatctgtaggagacagagtcaccatcacttgccgggcaagtcagagcattagcagctatttaaattggtatcagcagaaaccagggaaagcccctaagctcctgatctatgctgcatccagtttgcaaagtggggtcccatcaaggttcagtggcagtggatctgggacagatttcactctcaccatcagcagtctgcaacctgaagattttgcaacttactactgtcagcaaagctacatcgccccttacacttttggcggagggaccaaggttgagatcaaaggagggggcggatcaggcggaggtggatcgggagggggtggtagcgaggtgcagctggtggagtctgggggaggcttggtccagcctggagggtccctgagactctcctgtgcagcctctggattcaccttcagtgaccactacatggactgggtccgccaggctccagggaaggggctggagtgggttggccgtactagaaacaaagctagtagttacaccacagaatacgccgcgtctgtgaaaggcagattcaccatctcaagagatgattcaaagaactcactgtatctgcaaatgaacagcctgaaaaccgaggacacggcggtgtactactgcgccagagagcctaaatactggatcgacttcgacctatgggggagaggtaccttggtcaccgtctcctcaggtggaggcggttcgggtggagggggatctggtggcggaggtagcggtggcgggggatcaggtggcgggggatcaggtggcgggggatcaggtggcgggggatcaggtggcgggggatcaggtggcgggggatcaggtggcgggggatcaggtggcgggggatcacccgctgctctgctgcctgcccggggtaccaacatggcccagaagcgtcctgcctgcaccctgaagcctgagtgtgtccagcagctgctggtttgctcccaggaggccaagaagtcagcctactgcccctacagtcactttcctgtgggggctgccctgctcacccaggaggggagaatcttcaaagggtgcaacatagaaaatgcctgctacccgctgggcatctgtgctgaacggaccgctatccagaaggccgtctcagaagggtacaaggatttcagggcaattgctatcgccagtgacatgcaagatgattttatctctccatgtggggcctgcaggcaagtcatgagagagtttggcaccaactggcccgtgtacatgaccaagccggatggtacgtatatt

SEQ ID NO: 739 - DNA, 1317 bp, synthetic construct
  source 1..1317: mol_type = other DNA
gacatccagatgacccagtctccatcctccctgtctgcatctgtaggagacagagtcaccatcacttgccgggcaagtcagagcattagcagctatttaaattggtatcagcagaaaccagggaaagcccctaagctcctgatctatgctgcatccagtttgcaaagtggggtcccatcaaggttcagtggcagtggatctgggacagatttcactctcaccatcagcagtctgcaacctgaagattttgcaacttactactgtcagcaaagctacatcgccccttacacttttggcggagggaccaaggttgagatcaaaggagggggcggatcaggcggaggtggatcgggagggggtggtagcgaggtgcagctggtggagtctgggggaggcttggtccagcctggagggtccctgagactctcctgtgcagcctctggattcaccttcagtgaccactacatggactgggtccgccaggctccagggaaggggctggagtgggttggccgtactagaaacaaagctagtagttacaccacagaatacgccgcgtctgtgaaaggcagattcaccatctcaagagatgattcaaagaactcactgtatctgcaaatgaacagcctgaaaaccgaggacacggcggtgtactactgcgccagagagcctaaatactggatcgacttcgacctatgggggagaggtaccttggtcaccgtctcctcaggtggaggcggttcgggtggagggggatctggtggcggaggtagcggtggcgggggatcaggtggcgggggatcaggtggcgggggatcaggtggcgggggatcaggtggcgggggatcaggtggcgggggatcaggtggcgggggatcaggtggcgggggatcaggtggcgggggatcacccgctgctctgctgcctgcccggggtaccaacatggcccagaagcgtcctgcctgcaccctgaagcctgagtgtgtccagcagctgctggtttgctcccaggaggccaagaagtcagcctactgcccctacagtcactttcctgtgggggctgccctgctcacccaggaggggagaatcttcaaagggtgcaacatagaaaatgcctgctacccgctgggcatctgtgctgaacggaccgctatccagaaggccgtctcagaagggtacaaggatttcagggcaattgctatcgccagtgacatgcaagatgattttatctctccatgtggggcctgcaggcaagtcatgagagagtttggcaccaactggcccgtgtacatgaccaagccggatggtacgtatatt

SEQ ID NO: 740 - DNA, 1125 bp, synthetic construct
  source 1..1125: mol_type = other DNA
gacatccagatgacccagtctccatcctccctgtctgcatctgtaggagacagagtcaccatcacttgccgggcaagtcagagcattagcagctatttaaattggtatcagcagaaaccagggaaagcccctaagctcctgatctatgctgcatccagtttgcaaagtggggtcccatcaaggttcagtggcagtggatctgggacagatttcactctcaccatcagcagtctgcaacctgaagattttgcaacttactactgtcagcaaagctacatcgccccttacacttttggcggagggaccaaggttgagatcaaaggagggggcggatcaggcggaggtggatcgggagggggtggtagcgaggtgcagctggtggagtctgggggaggcttggtacagccagggcggtccctgagactctcctgtacagcttctggattcaccttcagtgaccacgacatgaactgggtccgccaggctccagggaaggggctggagtgggttggccgtactagaaacgccgctggaagttacaccacagaatacgccgcgtctgtgaaaggcagattcaccatctcaagagatgattcaaagaactcactgtatctgcaaatgaacagcctgaaaaccgaggacacggcggtgtactactgcgccagagagcctaaatactggatcgacttcgacctatgggggggtggcgggggatcacccgctgctctgctgcctgcccggggtaccaacatggcccagaagcgtcctgcctgcaccctgaagcctgagtgtgtccagcagctgctggtttgctcccaggaggccaagaagtcagcctactgcccctacagtcactttcctgtgggggctgccctgctcacccaggaggggagaatcttcaaagggtgcaacatagaaaatgcctgctacccgctgggcatctgtgctgaacggaccgctatccagaaggccgtctcagaagggtacaaggatttcagggcaattgctatcgccagtgacatgcaagatgattttatctctccatgtggggcctgcaggcaagtcatgagagagtttggcaccaactggcccgtgtacatgaccaagccggatggtacgtatatt

SEQ ID NO: 741 - DNA, 1155 bp, synthetic construct
  source 1..1155: mol_type = other DNA
gacatccagatgacccagtctccatcctccctgtctgcatctgtaggagacagagtcaccatcacttgccgggcaagtcagagcattagcagctatttaaattggtatcagcagaaaccagggaaagcccctaagctcctgatctatgctgcatccagtttgcaaagtggggtcccatcaaggttcagtggcagtggatctgggacagatttcactctcaccatcagcagtctgcaacctgaagattttgcaacttactactgtcagcaaagctacatcgccccttacacttttggcggagggaccaaggttgagatcaaaggagggggcggatcaggcggaggtggatcgggagggggtggtagcgaggtgcagctggtggagtctgggggaggcttggtacagccagggcggtccctgagactctcctgtacagcttctggattcaccttcagtgaccacgacatgaactgggtccgccaggctccagggaaggggctggagtgggttggccgtactagaaacgccgctggaagttacaccacagaatacgccgcgtctgtgaaaggcagattcaccatctcaagagatgattcaaagaactcactgtatctgcaaatgaacagcctgaaaaccgaggacacggcggtgtactactgcgccagagagcctaaatactggatcgacttcgacctatgggggggagggggcggatcaggcggaggtggatcgggagggggtggtagccccgctgctctgctgcctgcccggggtaccaacatggcccagaagcgtcctgcctgcaccctgaagcctgagtgtgtccagcagctgctggtttgctcccaggaggccaagaagtcagcctactgcccctacagtcactttcctgtgggggctgccctgctcacccaggaggggagaatcttcaaagggtgcaacatagaaaatgcctgctacccgctgggcatctgtgctgaacggaccgctatccagaaggccgtctcagaagggtacaaggatttcagggcaattgctatcgccagtgacatgcaagatgattttatctctccatgtggggcctgcaggcaagtcatgagagagtttggcaccaactggcccgtgtacatgaccaagccggatggtacgtatatt

SEQ ID NO: 742 - DNA, 1170 bp, synthetic construct
  source 1..1170: mol_type = other DNA
gacatccagatgacccagtctccatcctccctgtctgcatctgtaggagacagagtcaccatcacttgccgggcaagtcagagcattagcagctatttaaattggtatcagcagaaaccagggaaagcccctaagctcctgatctatgctgcatccagtttgcaaagtggggtcccatcaaggttcagtggcagtggatctgggacagatttcactctcaccatcagcagtctgcaacctgaagattttgcaacttactactgtcagcaaagctacatcgccccttacacttttggcggagggaccaaggttgagatcaaaggagggggcggatcaggcggaggtggatcgggagggggtggtagcgaggtgcagctggtggagtctgggggaggcttggtacagccagggcggtccctgagactctcctgtacagcttctggattcaccttcagtgaccacgacatgaactgggtccgccaggctccagggaaggggctggagtgggttggccgtactagaaacgccgctggaagttacaccacagaatacgccgcgtctgtgaaaggcagattcaccatctcaagagatgattcaaagaactcactgtatctgcaaatgaacagcctgaaaaccgaggacacggcggtgtactactgcgccagagagcctaaatactggatcgacttcgacctatgggggggtggaggcggttcgggtggagggggatctggtggcggaggtagcggtggcgggggatcacccgctgctctgctgcctgcccggggtaccaacatggcccagaagcgtcctgcctgcaccctgaagcctgagtgtgtccagcagctgctggtttgctcccaggaggccaagaagtcagcctactgcccctacagtcactttcctgtgggggctgccctgctcacccaggaggggagaatcttcaaagggtgcaacatagaaaatgcctgctacccgctgggcatctgtgctgaacggaccgctatccagaaggccgtctcagaagggtacaaggatttcagggcaattgctatcgccagtgacatgcaagatgattttatctctccatgtggggcctgcaggcaagtcatgagagagtttggcaccaactggcccgtgtacatgaccaagccggatggtacgtatatt

SEQ ID NO: 743 - DNA, 1185 bp, synthetic construct
  source 1..1185: mol_type = other DNA
gacatccagatgacccagtctccatcctccctgtctgcatctgtaggagacagagtcaccatcacttgccgggcaagtcagagcattagcagctatttaaattggtatcagcagaaaccagggaaagcccctaagctcctgatctatgctgcatccagtttgcaaagtggggtcccatcaaggttcagtggcagtggatctgggacagatttcactctcaccatcagcagtctgcaacctgaagattttgcaacttactactgtcagcaaagctacatcgccccttacacttttggcggagggaccaaggttgagatcaaaggagggggcggatcaggcggaggtggatcgggagggggtggtagcgaggtgcagctggtggagtctgggggaggcttggtacagccagggcggtccctgagactctcctgtacagcttctggattcaccttcagtgaccacgacatgaactgggtccgccaggctccagggaaggggctggagtgggttggccgtactagaaacgccgctggaagttacaccacagaatacgccgcgtctgtgaaaggcagattcaccatctcaagagatgattcaaagaactcactgtatctgcaaatgaacagcctgaaaaccgaggacacggcggtgtactactgcgccagagagcctaaatactggatcgacttcgacctatgggggggtggaggcggttcgggtggagggggatctggtggcggaggtagcggtggcgggggatcaggtggcgggggatcacccgctgctctgctgcctgcccggggtaccaacatggcccagaagcgtcctgcctgcaccctgaagcctgagtgtgtccagcagctgctggtttgctcccaggaggccaagaagtcagcctactgcccctacagtcactttcctgtgggggctgccctgctcacccaggaggggagaatcttcaaagggtgcaacatagaaaatgcctgctacccgctgggcatctgtgctgaacggaccgctatccagaaggccgtctcagaagggtacaaggatttcagggcaattgctatcgccagtgacatgcaagatgattttatctctccatgtggggcctgcaggcaagtcatgagagagtttggcaccaactggcccgtgtacatgaccaagccggatggtacgtatatt

SEQ ID NO: 744 - DNA, 1200 bp, synthetic construct
  source 1..1200: mol_type = other DNA
gacatccagatgacccagtctccatcctccctgtctgcatctgtaggagacagagtcaccatcacttgccgggcaagtcagagcattagcagctatttaaattggtatcagcagaaaccagggaaagcccctaagctcctgatctatgctgcatccagtttgcaaagtggggtcccatcaaggttcagtggcagtggatctgggacagatttcactctcaccatcagcagtctgcaacctgaagattttgcaacttactactgtcagcaaagctacatcgccccttacacttttggcggagggaccaaggttgagatcaaaggagggggcggatcaggcggaggtggatcgggagggggtggtagcgaggtgcagctggtggagtctgggggaggcttggtacagccagggcggtccctgagactctcctgtacagcttctggattcaccttcagtgaccacgacatgaactgggtccgccaggctccagggaaggggctggagtgggttggccgtactagaaacgccgctggaagttacaccacagaatacgccgcgtctgtgaaaggcagattcaccatctcaagagatgattcaaagaactcactgtatctgcaaatgaacagcctgaaaaccgaggacacggcggtgtactactgcgccagagagcctaaatactggatcgacttcgacctatgggggggtggaggcggttcgggtggagggggatctggtggcggaggtagcggtggcgggggatcaggtggcgggggatcaggtggcgggggatcacccgctgctctgctgcctgcccggggtaccaacatggcccagaagcgtcctgcctgcaccctgaagcctgagtgtgtccagcagctgctggtttgctcccaggaggccaagaagtcagcctactgcccctacagtcactttcctgtgggggctgccctgctcacccaggaggggagaatcttcaaagggtgcaacatagaaaatgcctgctacccgctgggcatctgtgctgaacggaccgctatccagaaggccgtctcagaagggtacaaggatttcagggcaattgctatcgccagtgacatgcaagatgattttatctctccatgtggggcctgcaggcaagtcatgagagagtttggcaccaactggcccgtgtacatgaccaagccggatggtacgtatatt

SEQ ID NO: 745 - DNA, 1215 bp, synthetic construct
  source 1..1215: mol_type = other DNA
gacatccagatgacccagtctccatcctccctgtctgcatctgtaggagacagagtcaccatcacttgccgggcaagtcagagcattagcagctatttaaattggtatcagcagaaaccagggaaagcccctaagctcctgatctatgctgcatccagtttgcaaagtggggtcccatcaaggttcagtggcagtggatctgggacagatttcactctcaccatcagcagtctgcaacctgaagattttgcaacttactactgtcagcaaagctacatcgccccttacacttttggcggagggaccaaggttgagatcaaaggagggggcggatcaggcggaggtggatcgggagggggtggtagcgaggtgcagctggtggagtctgggggaggcttggtacagccagggcggtccctgagactctcctgtacagcttctggattcaccttcagtgaccacgacatgaactgggtccgccaggctccagggaaggggctggagtgggttggccgtactagaaacgccgctggaagttacaccacagaatacgccgcgtctgtgaaaggcagattcaccatctcaagagatgattcaaagaactcactgtatctgcaaatgaacagcctgaaaaccgaggacacggcggtgtactactgcgccagagagcctaaatactggatcgacttcgacctatgggggggtggaggcggttcgggtggagggggatctggtggcggaggtagcggtggcgggggatcaggtggcgggggatcaggtggcgggggatcaggtggcgggggatcacccgctgctctgctgcctgcccggggtaccaacatggcccagaagcgtcctgcctgcaccctgaagcctgagtgtgtccagcagctgctggtttgctcccaggaggccaagaagtcagcctactgcccctacagtcactttcctgtgggggctgccctgctcacccaggaggggagaatcttcaaagggtgcaacatagaaaatgcctgctacccgctgggcatctgtgctgaacggaccgctatccagaaggccgtctcagaagggtacaaggatttcagggcaattgctatcgccagtgacatgcaagatgattttatctctccatgtggggcctgcaggcaagtcatgagagagtttggcaccaactggcccgtgtacatgaccaagccggatggtacgtatatt

SEQ ID NO: 746 - DNA, 1230 bp, synthetic construct
  source 1..1230: mol_type = other DNA
gacatccagatgacccagtctccatcctccctgtctgcatctgtaggagacagagtcaccatcacttgccgggcaagtcagagcattagcagctatttaaattggtatcagcagaaaccagggaaagcccctaagctcctgatctatgctgcatccagtttgcaaagtggggtcccatcaaggttcagtggcagtggatctgggacagatttcactctcaccatcagcagtctgcaacctgaagattttgcaacttactactgtcagcaaagctacatcgccccttacacttttggcggagggaccaaggttgagatcaaaggagggggcggatcaggcggaggtggatcgggagggggtggtagcgaggtgcagctggtggagtctgggggaggcttggtacagccagggcggtccctgagactctcctgtacagcttctggattcaccttcagtgaccacgacatgaactgggtccgccaggctccagggaaggggctggagtgggttggccgtactagaaacgccgctggaagttacaccacagaatacgccgcgtctgtgaaaggcagattcaccatctcaagagatgattcaaagaactcactgtatctgcaaatgaacagcctgaaaaccgaggacacggcggtgtactactgcgccagagagcctaaatactggatcgacttcgacctatgggggggtggaggcggttcgggtggagggggatctggtggcggaggtagcggtggcgggggatcaggtggcgggggatcaggtggcgggggatcaggtggcgggggatcaggtggcgggggatcacccgctgctctgctgcctgcccggggtaccaacatggcccagaagcgtcctgcctgcaccctgaagcctgagtgtgtccagcagctgctggtttgctcccaggaggccaagaagtcagcctactgcccctacagtcactttcctgtgggggctgccctgctcacccaggaggggagaatcttcaaagggtgcaacatagaaaatgcctgctacccgctgggcatctgtgctgaacggaccgctatccagaaggccgtctcagaagggtacaaggatttcagggcaattgctatcgccagtgacatgcaagatgattttatctctccatgtggggcctgcaggcaagtcatgagagagtttggcaccaactggcccgtgtacatgaccaagccggatggtacgtatatt

SEQ ID NO: 747 - DNA, 1245 bp, synthetic construct
  source 1..1245: mol_type = other DNA
gacatccagatgacccagtctccatcctccctgtctgcatctgtaggagacagagtcaccatcacttgccgggcaagtcagagcattagcagctatttaaattggtatcagcagaaaccagggaaagcccctaagctcctgatctatgctgcatccagtttgcaaagtggggtcccatcaaggttcagtggcagtggatctgggacagatttcactctcaccatcagcagtctgcaacctgaagattttgcaacttactactgtcagcaaagctacatcgccccttacacttttggcggagggaccaaggttgagatcaaaggagggggcggatcaggcggaggtggatcgggagggggtggtagcgaggtgcagctggtggagtctgggggaggcttggtacagccagggcggtccctgagactctcctgtacagcttctggattcaccttcagtgaccacgacatgaactgggtccgccaggctccagggaaggggctggagtgggttggccgtactagaaacgccgctggaagttacaccacagaatacgccgcgtctgtgaaaggcagattcaccatctcaagagatgattcaaagaactcactgtatctgcaaatgaacagcctgaaaaccgaggacacggcggtgtactactgcgccagagagcctaaatactggatcgacttcgacctatgggggggtggaggcggttcgggtggagggggatctggtggcggaggtagcggtggcgggggatcaggtggcgggggatcaggtggcgggggatcaggtggcgggggatcaggtggcgggggatcaggtggcgggggatcacccgctgctctgctgcctgcccggggtaccaacatggcccagaagcgtcctgcctgcaccctgaagcctgagtgtgtccagcagctgctggtttgctcccaggaggccaagaagtcagcctactgcccctacagtcactttcctgtgggggctgccctgctcacccaggaggggagaatcttcaaagggtgcaacatagaaaatgcctgctacccgctgggcatctgtgctgaacggaccgctatccagaaggccgtctcagaagggtacaaggatttcagggcaattgctatcgccagtgacatgcaagatgattttatctctccatgtggggcctgcaggcaagtcatgagagagtttggcaccaactggcccgtgtacatgaccaagccggatggtacgtatatt

SEQ ID NO: 748 - DNA, 1260 bp, synthetic construct
  source 1..1260: mol_type = other DNA
gacatccagatgacccagtctccatcctccctgtctgcatctgtaggagacagagtcaccatcacttgccgggcaagtcagagcattagcagctatttaaattggtatcagcagaaaccagggaaagcccctaagctcctgatctatgctgcatccagtttgcaaagtggggtcccatcaaggttcagtggcagtggatctgggacagatttcactctcaccatcagcagtctgcaacctgaagattttgcaacttactactgtcagcaaagctacatcgccccttacacttttggcggagggaccaaggttgagatcaaaggagggggcggatcaggcggaggtggatcgggagggggtggtagcgaggtgcagctggtggagtctgggggaggcttggtacagccagggcggtccctgagactctcctgtacagcttctggattcaccttcagtgaccacgacatgaactgggtccgccaggctccagggaaggggctggagtgggttggccgtactagaaacgccgctggaagttacaccacagaatacgccgcgtctgtgaaaggcagattcaccatctcaagagatgattcaaagaactcactgtatctgcaaatgaacagcctgaaaaccgaggacacggcggtgtactactgcgccagagagcctaaatactggatcgacttcgacctatgggggggtggaggcggttcgggtggagggggatctggtggcggaggtagcggtggcgggggatcaggtggcgggggatcaggtggcgggggatcaggtggcgggggatcaggtggcgggggatcaggtggcgggggatcaggtggcgggggatcacccgctgctctgctgcctgcccggggtaccaacatggcccagaagcgtcctgcctgcaccctgaagcctgagtgtgtccagcagctgctggtttgctcccaggaggccaagaagtcagcctactgcccctacagtcactttcctgtgggggctgccctgctcacccaggaggggagaatcttcaaagggtgcaacatagaaaatgcctgctacccgctgggcatctgtgctgaacggaccgctatccagaaggccgtctcagaagggtacaaggatttcagggcaattgctatcgccagtgacatgcaagatgattttatctctccatgtggggcctgcaggcaagtcatgagagagtttggcaccaactggcccgtgtacatgaccaagccggatggtacgtatatt

SEQ ID NO: 749 - DNA, 1275 bp, synthetic construct
  source 1..1275: mol_type = other DNA
gacatccagatgacccagtctccatcctccctgtctgcatctgtaggagacagagtcaccatcacttgccgggcaagtcagagcattagcagctatttaaattggtatcagcagaaaccagggaaagcccctaagctcctgatctatgctgcatccagtttgcaaagtggggtcccatcaaggttcagtggcagtggatctgggacagatttcactctcaccatcagcagtctgcaacctgaagattttgcaacttactactgtcagcaaagctacatcgccccttacacttttggcggagggaccaaggttgagatcaaaggagggggcggatcaggcggaggtggatcgggagggggtggtagcgaggtgcagctggtggagtctgggggaggcttggtacagccagggcggtccctgagactctcctgtacagcttctggattcaccttcagtgaccacgacatgaactgggtccgccaggctccagggaaggggctggagtgggttggccgtactagaaacgccgctggaagttacaccacagaatacgccgcgtctgtgaaaggcagattcaccatctcaagagatgattcaaagaactcactgtatctgcaaatgaacagcctgaaaaccgaggacacggcggtgtactactgcgccagagagcctaaatactggatcgacttcgacctatgggggggtggaggcggttcgggtggagggggatctggtggcggaggtagcggtggcgggggatcaggtggcgggggatcaggtggcgggggatcaggtggcgggggatcaggtggcgggggatcaggtggcgggggatcaggtggcgggggatcaggtggcgggggatcacccgctgctctgctgcctgcccggggtaccaacatggcccagaagcgtcctgcctgcaccctgaagcctgagtgtgtccagcagctgctggtttgctcccaggaggccaagaagtcagcctactgcccctacagtcactttcctgtgggggctgccctgctcacccaggaggggagaatcttcaaagggtgcaacatagaaaatgcctgctacccgctgggcatctgtgctgaacggaccgctatccagaaggccgtctcagaagggtacaaggatttcagggcaattgctatcgccagtgacatgcaagatgattttatctctccatgtggggcctgcaggcaagtcatgagagagtttggcaccaactggcccgtgtacatgaccaagccggatggtacgtatatt

SEQ ID NO: 750 - DNA, 1290 bp, synthetic construct
  source 1..1290: mol_type = other DNA
gacatccagatgacccagtctccatcctccctgtctgcatctgtaggagacagagtcaccatcacttgccgggcaagtcagagcattagcagctatttaaattggtatcagcagaaaccagggaaagcccctaagctcctgatctatgctgcatccagtttgcaaagtggggtcccatcaaggttcagtggcagtggatctgggacagatttcactctcaccatcagcagtctgcaacctgaagattttgcaacttactactgtcagcaaagctacatcgccccttacacttttggcggagggaccaaggttgagatcaaaggagggggcggatcaggcggaggtggatcgggagggggtggtagcgaggtgcagctggtggagtctgggggaggcttggtacagccagggcggtccctgagactctcctgtacagcttctggattcaccttcagtgaccacgacatgaactgggtccgccaggctccagggaaggggctggagtgggttggccgtactagaaacgccgctggaagttacaccacagaatacgccgcgtctgtgaaaggcagattcaccatctcaagagatgattcaaagaactcactgtatctgcaaatgaacagcctgaaaaccgaggacacggcggtgtactactgcgccagagagcctaaatactggatcgacttcgacctatgggggggtggaggcggttcgggtggagggggatctggtggcggaggtagcggtggcgggggatcaggtggcgggggatcaggtggcgggggatcaggtggcgggggatcaggtggcgggggatcaggtggcgggggatcaggtggcgggggatcaggtggcgggggatcaggtggcgggggatcacccgctgctctgctgcctgcccggggtaccaacatggcccagaagcgtcctgcctgcaccctgaagcctgagtgtgtccagcagctgctggtttgctcccaggaggccaagaagtcagcctactgcccctacagtcactttcctgtgggggctgccctgctcacccaggaggggagaatcttcaaagggtgcaacatagaaaatgcctgctacccgctgggcatctgtgctgaacggaccgctatccagaaggccgtctcagaagggtacaaggatttcagggcaattgctatcgccagtgacatgcaagatgattttatctctccatgtggggcctgcaggcaagtcatgagagagtttggcaccaactggcccgtgtacatgaccaagccggatggtacgtatatt

SEQ ID NO: 751 - DNA, 1152 bp, synthetic construct
  source 1..1152: mol_type = other DNA
gaggtgcagctggtggagtctgggggaggcttggtccagcctggagggtccctgagactctcctgtgcagcctctggattcaccttcgtagaccacgacatggactgggtccgccaggctccagggaaggggctggagtgggttggccgtactagaaacaaactaggaagttacaccacagaatacgccgcgtctgtgaaaggcagattcaccatctcaagagatgattcaaagaactcactgtatctgcaaatgaacagcctgaaaaccgaggacacggcggtgtactactgcgccagagagcctaaatactggatcgacttcgacctatgggggagaggtaccttggtcaccgtctcctcaggagggggcggatcaggcggaggtggatcgggagggggtggtagcgacatccagatgacccagtctccatcctccctgtctgcatctgtaggagacagagtcaccatcacttgccgggcaagtcagagcattagcagctatttaaattggtatcagcagaaaccagggaaagcccctaagctcctgatctatgctgcatccagtttgcaaagtggggtcccatcaaggttcagtggcagtggatgcggtacagatttcactctcaccatcagcagtctgcaacctgaagattttgcaacttactactgtcagcaaagctacatcgccccttacacttttggcggagggaccaaggttgagatcaaaggtggcgggggatcacccgctgctctgctgcctgcccggggtaccaacatggcccagaagcgtcctgcctgcaccctgaagcctgagtgtgtccagcagctgctggtttgctcccaggaggccaagaagtcagcctactgcccctacagtcactttcctgtgggggctgccctgctcacccaggaggggagaatcttcaaagggtgcaacatagaaaatgcctgctacccgctgggcatctgtgctgaacggaccgctatccagaaggccgtctcagaagggtacaaggatttcagggcaattgctatcgccagtgacatgcaagatgattttatctctccatgtggggcctgcaggcaagtcatgagagagtttggcaccaactggcccgtgtacatgaccaagccggatggtacgtatatt

SEQ ID NO: 752 - DNA, 1182 bp, synthetic construct
  source 1..1182: mol_type = other DNA
gaggtgcagctggtggagtctgggggaggcttggtccagcctggagggtccctgagactctcctgtgcagcctctggattcaccttcgtagaccacgacatggactgggtccgccaggctccagggaaggggctggagtgggttggccgtactagaaacaaactaggaagttacaccacagaatacgccgcgtctgtgaaaggcagattcaccatctcaagagatgattcaaagaactcactgtatctgcaaatgaacagcctgaaaaccgaggacacggcggtgtactactgcgccagagagcctaaatactggatcgacttcgacctatgggggagaggtaccttggtcaccgtctcctcaggagggggcggatcaggcggaggtggatcgggagggggtggtagcgacatccagatgacccagtctccatcctccctgtctgcatctgtaggagacagagtcaccatcacttgccgggcaagtcagagcattagcagctatttaaattggtatcagcagaaaccagggaaagcccctaagctcctgatctatgctgcatccagtttgcaaagtggggtcccatcaaggttcagtggcagtggatgcggtacagatttcactctcaccatcagcagtctgcaacctgaagattttgcaacttactactgtcagcaaagctacatcgccccttacacttttggcggagggaccaaggttgagatcaaaggagggggcggatcaggcggaggtggatcgggagggggtggtagccccgctgctctgctgcctgcccggggtaccaacatggcccagaagcgtcctgcctgcaccctgaagcctgagtgtgtccagcagctgctggtttgctcccaggaggccaagaagtcagcctactgcccctacagtcactttcctgtgggggctgccctgctcacccaggaggggagaatcttcaaagggtgcaacatagaaaatgcctgctacccgctgggcatctgtgctgaacggaccgctatccagaaggccgtctcagaagggtacaaggatttcagggcaattgctatcgccagtgacatgcaagatgattttatctctccatgtggggcctgcaggcaagtcatgagagagtttggcaccaactggcccgtgtacatgaccaagccggatggtacgtatatt

SEQ ID NO: 753 - DNA, 1197 bp, synthetic construct
  source 1..1197: mol_type = other DNA
gaggtgcagctggtggagtctgggggaggcttggtccagcctggagggtccctgagactctcctgtgcagcctctggattcaccttcgtagaccacgacatggactgggtccgccaggctccagggaaggggctggagtgggttggccgtactagaaacaaactaggaagttacaccacagaatacgccgcgtctgtgaaaggcagattcaccatctcaagagatgattcaaagaactcactgtatctgcaaatgaacagcctgaaaaccgaggacacggcggtgtactactgcgccagagagcctaaatactggatcgacttcgacctatgggggagaggtaccttggtcaccgtctcctcaggagggggcggatcaggcggaggtggatcgggagggggtggtagcgacatccagatgacccagtctccatcctccctgtctgcatctgtaggagacagagtcaccatcacttgccgggcaagtcagagcattagcagctatttaaattggtatcagcagaaaccagggaaagcccctaagctcctgatctatgctgcatccagtttgcaaagtggggtcccatcaaggttcagtggcagtggatgcggtacagatttcactctcaccatcagcagtctgcaacctgaagattttgcaacttactactgtcagcaaagctacatcgccccttacacttttggcggagggaccaaggttgagatcaaaggtggaggcggttcgggtggagggggatctggtggcggaggtagcggtggcgggggatcacccgctgctctgctgcctgcccggggtaccaacatggcccagaagcgtcctgcctgcaccctgaagcctgagtgtgtccagcagctgctggtttgctcccaggaggccaagaagtcagcctactgcccctacagtcactttcctgtgggggctgccctgctcacccaggaggggagaatcttcaaagggtgcaacatagaaaatgcctgctacccgctgggcatctgtgctgaacggaccgctatccagaaggccgtctcagaagggtacaaggatttcagggcaattgctatcgccagtgacatgcaagatgattttatctctccatgtggggcctgcaggcaagtcatgagagagtttggcaccaactggcccgtgtacatgaccaagccggatggtacgtatatt

SEQ ID NO: 754 - DNA, 1212 bp, synthetic construct
  source 1..1212: mol_type = other DNA
gaggtgcagctggtggagtctgggggaggcttggtccagcctggagggtccctgagactctcctgtgcagcctctggattcaccttcgtagaccacgacatggactgggtccgccaggctccagggaaggggctggagtgggttggccgtactagaaacaaactaggaagttacaccacagaatacgccgcgtctgtgaaaggcagattcaccatctcaagagatgattcaaagaactcactgtatctgcaaatgaacagcctgaaaaccgaggacacggcggtgtactactgcgccagagagcctaaatactggatcgacttcgacctatgggggagaggtaccttggtcaccgtctcctcaggagggggcggatcaggcggaggtggatcgggagggggtggtagcgacatccagatgacccagtctccatcctccctgtctgcatctgtaggagacagagtcaccatcacttgccgggcaagtcagagcattagcagctatttaaattggtatcagcagaaaccagggaaagcccctaagctcctgatctatgctgcatccagtttgcaaagtggggtcccatcaaggttcagtggcagtggatgcggtacagatttcactctcaccatcagcagtctgcaacctgaagattttgcaacttactactgtcagcaaagctacatcgccccttacacttttggcggagggaccaaggttgagatcaaaggtggaggcggttcgggtggagggggatctggtggcggaggtagcggtggcgggggatcaggtggcgggggatcacccgctgctctgctgcctgcccggggtaccaacatggcccagaagcgtcctgcctgcaccctgaagcctgagtgtgtccagcagctgctggtttgctcccaggaggccaagaagtcagcctactgcccctacagtcactttcctgtgggggctgccctgctcacccaggaggggagaatcttcaaagggtgcaacatagaaaatgcctgctacccgctgggcatctgtgctgaacggaccgctatccagaaggccgtctcagaagggtacaaggatttcagggcaattgctatcgccagtgacatgcaagatgattttatctctccatgtggggcctgcaggcaagtcatgagagagtttggcaccaactggcccgtgtacatgaccaagccggatggtacgtatatt

SEQ ID NO: 755 - DNA, 1227 bp, synthetic construct
  source 1..1227: mol_type = other DNA
gaggtgcagctggtggagtctgggggaggcttggtccagcctggagggtccctgagactctcctgtgcagcctctggattcaccttcgtagaccacgacatggactgggtccgccaggctccagggaaggggctggagtgggttggccgtactagaaacaaactaggaagttacaccacagaatacgccgcgtctgtgaaaggcagattcaccatctcaagagatgattcaaagaactcactgtatctgcaaatgaacagcctgaaaaccgaggacacggcggtgtactactgcgccagagagcctaaatactggatcgacttcgacctatgggggagaggtaccttggtcaccgtctcctcaggagggggcggatcaggcggaggtggatcgggagggggtggtagcgacatccagatgacccagtctccatcctccctgtctgcatctgtaggagacagagtcaccatcacttgccgggcaagtcagagcattagcagctatttaaattggtatcagcagaaaccagggaaagcccctaagctcctgatctatgctgcatccagtttgcaaagtggggtcccatcaaggttcagtggcagtggatgcggtacagatttcactctcaccatcagcagtctgcaacctgaagattttgcaacttactactgtcagcaaagctacatcgccccttacacttttggcggagggaccaaggttgagatcaaaggtggaggcggttcgggtggagggggatctggtggcggaggtagcggtggcgggggatcaggtggcgggggatcaggtggcgggggatcacccgctgctctgctgcctgcccggggtaccaacatggcccagaagcgtcctgcctgcaccctgaagcctgagtgtgtccagcagctgctggtttgctcccaggaggccaagaagtcagcctactgcccctacagtcactttcctgtgggggctgccctgctcacccaggaggggagaatcttcaaagggtgcaacatagaaaatgcctgctacccgctgggcatctgtgctgaacggaccgctatccagaaggccgtctcagaagggtacaaggatttcagggcaattgctatcgccagtgacatgcaagatgattttatctctccatgtggggcctgcaggcaagtcatgagagagtttggcaccaactggcccgtgtacatgaccaagccggatggtacgtatatt

SEQ ID NO: 756 - DNA, 1242 bp, synthetic construct
  source 1..1242: mol_type = other DNA
gaggtgcagctggtggagtctgggggaggcttggtccagcctggagggtccctgagactctcctgtgcagcctctggattcaccttcgtagaccacgacatggactgggtccgccaggctccagggaaggggctggagtgggttggccgtactagaaacaaactaggaagttacaccacagaatacgccgcgtctgtgaaaggcagattcaccatctcaagagatgattcaaagaactcactgtatctgcaaatgaacagcctgaaaaccgaggacacggcggtgtactactgcgccagagagcctaaatactggatcgacttcgacctatgggggagaggtaccttggtcaccgtctcctcaggagggggcggatcaggcggaggtggatcgggagggggtggtagcgacatccagatgacccagtctccatcctccctgtctgcatctgtaggagacagagtcaccatcacttgccgggcaagtcagagcattagcagctatttaaattggtatcagcagaaaccagggaaagcccctaagctcctgatctatgctgcatccagtttgcaaagtggggtcccatcaaggttcagtggcagtggatgcggtacagatttcactctcaccatcagcagtctgcaacctgaagattttgcaacttactactgtcagcaaagctacatcgccccttacacttttggcggagggaccaaggttgagatcaaaggtggaggcggttcgggtggagggggatctggtggcggaggtagcggtggcgggggatcaggtggcgggggatcaggtggcgggggatcaggtggcgggggatcacccgctgctctgctgcctgcccggggtaccaacatggcccagaagcgtcctgcctgcaccctgaagcctgagtgtgtccagcagctgctggtttgctcccaggaggccaagaagtcagcctactgcccctacagtcactttcctgtgggggctgccctgctcacccaggaggggagaatcttcaaagggtgcaacatagaaaatgcctgctacccgctgggcatctgtgctgaacggaccgctatccagaaggccgtctcagaagggtacaaggatttcagggcaattgctatcgccagtgacatgcaagatgattttatctctccatgtggggcctgcaggcaagtcatgagagagtttggcaccaactggcccgtgtacatgaccaagccggatggtacgtatatt

SEQ ID NO: 757 - DNA, 1257 bp, synthetic construct
  source 1..1257: mol_type = other DNA
gaggtgcagctggtggagtctgggggaggcttggtccagcctggagggtccctgagactctcctgtgcagcctctggattcaccttcgtagaccacgacatggactgggtccgccaggctccagggaaggggctggagtgggttggccgtactagaaacaaactaggaagttacaccacagaatacgccgcgtctgtgaaaggcagattcaccatctcaagagatgattcaaagaactcactgtatctgcaaatgaacagcctgaaaaccgaggacacggcggtgtactactgcgccagagagcctaaatactggatcgacttcgacctatgggggagaggtaccttggtcaccgtctcctcaggagggggcggatcaggcggaggtggatcgggagggggtggtagcgacatccagatgacccagtctccatcctccctgtctgcatctgtaggagacagagtcaccatcacttgccgggcaagtcagagcattagcagctatttaaattggtatcagcagaaaccagggaaagcccctaagctcctgatctatgctgcatccagtttgcaaagtggggtcccatcaaggttcagtggcagtggatgcggtacagatttcactctcaccatcagcagtctgcaacctgaagattttgcaacttactactgtcagcaaagctacatcgccccttacacttttggcggagggaccaaggttgagatcaaaggtggaggcggttcgggtggagggggatctggtggcggaggtagcggtggcgggggatcaggtggcgggggatcaggtggcgggggatcaggtggcgggggatcaggtggcgggggatcacccgctgctctgctgcctgcccggggtaccaacatggcccagaagcgtcctgcctgcaccctgaagcctgagtgtgtccagcagctgctggtttgctcccaggaggccaagaagtcagcctactgcccctacagtcactttcctgtgggggctgccctgctcacccaggaggggagaatcttcaaagggtgcaacatagaaaatgcctgctacccgctgggcatctgtgctgaacggaccgctatccagaaggccgtctcagaagggtacaaggatttcagggcaattgctatcgccagtgacatgcaagatgattttatctctccatgtggggcctgcaggcaagtcatgagagagtttggcaccaactggcccgtgtacatgaccaagccggatggtacgtatatt

SEQ ID NO: 758 - DNA, 1272 bp, synthetic construct
  source 1..1272: mol_type = other DNA
gaggtgcagctggtggagtctgggggaggcttggtccagcctggagggtccctgagactctcctgtgcagcctctggattcaccttcgtagaccacgacatggactgggtccgccaggctccagggaaggggctggagtgggttggccgtactagaaacaaactaggaagttacaccacagaatacgccgcgtctgtgaaaggcagattcaccatctcaagagatgattcaaagaactcactgtatctgcaaatgaacagcctgaaaaccgaggacacggcggtgtactactgcgccagagagcctaaatactggatcgacttcgacctatgggggagaggtaccttggtcaccgtctcctcaggagggggcggatcaggcggaggtggatcgggagggggtggtagcgacatccagatgacccagtctccatcctccctgtctgcatctgtaggagacagagtcaccatcacttgccgggcaagtcagagcattagcagctatttaaattggtatcagcagaaaccagggaaagcccctaagctcctgatctatgctgcatccagtttgcaaagtggggtcccatcaaggttcagtggcagtggatgcggtacagatttcactctcaccatcagcagtctgcaacctgaagattttgcaacttactactgtcagcaaagctacatcgccccttacacttttggcggagggaccaaggttgagatcaaaggtggaggcggttcgggtggagggggatctggtggcggaggtagcggtggcgggggatcaggtggcgggggatcaggtggcgggggatcaggtggcgggggatcaggtggcgggggatcaggtggcgggggatcacccgctgctctgctgcctgcccggggtaccaacatggcccagaagcgtcctgcctgcaccctgaagcctgagtgtgtccagcagctgctggtttgctcccaggaggccaagaagtcagcctactgcccctacagtcactttcctgtgggggctgccctgctcacccaggaggggagaatcttcaaagggtgcaacatagaaaatgcctgctacccgctgggcatctgtgctgaacggaccgctatccagaaggccgtctcagaagggtacaaggatttcagggcaattgctatcgccagtgacatgcaagatgattttatctctccatgtggggcctgcaggcaagtcatgagagagtttggcaccaactggcccgtgtacatgaccaagccggatggtacgtatatt

SEQ ID NO: 759 - DNA, 1287 bp, synthetic construct
  source 1..1287: mol_type = other DNA
gaggtgcagctggtggagtctgggggaggcttggtccagcctggagggtccctgagactctcctgtgcagcctctggattcaccttcgtagaccacgacatggactgggtccgccaggctccagggaaggggctggagtgggttggccgtactagaaacaaactaggaagttacaccacagaatacgccgcgtctgtgaaaggcagattcaccatctcaagagatgattcaaagaactcactgtatctgcaaatgaacagcctgaaaaccgaggacacggcggtgtactactgcgccagagagcctaaatactggatcgacttcgacctatgggggagaggtaccttggtcaccgtctcctcaggagggggcggatcaggcggaggtggatcgggagggggtggtagcgacatccagatgacccagtctccatcctccctgtctgcatctgtaggagacagagtcaccatcacttgccgggcaagtcagagcattagcagctatttaaattggtatcagcagaaaccagggaaagcccctaagctcctgatctatgctgcatccagtttgcaaagtggggtcccatcaaggttcagtggcagtggatgcggtacagatttcactctcaccatcagcagtctgcaacctgaagattttgcaacttactactgtcagcaaagctacatcgccccttacacttttggcggagggaccaaggttgagatcaaaggtggaggcggttcgggtggagggggatctggtggcggaggtagcggtggcgggggatcaggtggcgggggatcaggtggcgggggatcaggtggcgggggatcaggtggcgggggatcaggtggcgggggatcaggtggcgggggatcacccgctgctctgctgcctgcccggggtaccaacatggcccagaagcgtcctgcctgcaccctgaagcctgagtgtgtccagcagctgctggtttgctcccaggaggccaagaagtcagcctactgcccctacagtcactttcctgtgggggctgccctgctcacccaggaggggagaatcttcaaagggtgcaacatagaaaatgcctgctacccgctgggcatctgtgctgaacggaccgctatccagaaggccgtctcagaagggtacaaggatttcagggcaattgctatcgccagtgacatgcaagatgattttatctctccatgtggggcctgcaggcaagtcatgagagagtttggcaccaactggcccgtgtacatgaccaagccggatggtacgtatatt

SEQ ID NO: 760 - DNA, 1302 bp, synthetic construct
  source 1..1302: mol_type = other DNA
gaggtgcagctggtggagtctgggggaggcttggtccagcctggagggtccctgagactctcctgtgcagcctctggattcaccttcgtagaccacgacatggactgggtccgccaggctccagggaaggggctggagtgggttggccgtactagaaacaaactaggaagttacaccacagaatacgccgcgtctgtgaaaggcagattcaccatctcaagagatgattcaaagaactcactgtatctgcaaatgaacagcctgaaaaccgaggacacggcggtgtactactgcgccagagagcctaaatactggatcgacttcgacctatgggggagaggtaccttggtcaccgtctcctcaggagggggcggatcaggcggaggtggatcgggagggggtggtagcgacatccagatgacccagtctccatcctccctgtctgcatctgtaggagacagagtcaccatcacttgccgggcaagtcagagcattagcagctatttaaattggtatcagcagaaaccagggaaagcccctaagctcctgatctatgctgcatccagtttgcaaagtggggtcccatcaaggttcagtggcagtggatgcggtacagatttcactctcaccatcagcagtctgcaacctgaagattttgcaacttactactgtcagcaaagctacatcgccccttacacttttggcggagggaccaaggttgagatcaaaggtggaggcggttcgggtggagggggatctggtggcggaggtagcggtggcgggggatcaggtggcgggggatcaggtggcgggggatcaggtggcgggggatcaggtggcgggggatcaggtggcgggggatcaggtggcgggggatcaggtggcgggggatcacccgctgctctgctgcctgcccggggtaccaacatggcccagaagcgtcctgcctgcaccctgaagcctgagtgtgtccagcagctgctggtttgctcccaggaggccaagaagtcagcctactgcccctacagtcactttcctgtgggggctgccctgctcacccaggaggggagaatcttcaaagggtgcaacatagaaaatgcctgctacccgctgggcatctgtgctgaacggaccgctatccagaaggccgtctcagaagggtacaaggatttcagggcaattgctatcgccagtgacatgcaagatgattttatctctccatgtggggcctgcaggcaagtcatgagagagtttggcaccaactggcccgtgtacatgaccaagccggatggtacgtatatt

SEQ ID NO: 761 - DNA, 1317 bp, synthetic construct
  source 1..1317: mol_type = other DNA
gaggtgcagctggtggagtctgggggaggcttggtccagcctggagggtccctgagactctcctgtgcagcctctggattcaccttcgtagaccacgacatggactgggtccgccaggctccagggaaggggctggagtgggttggccgtactagaaacaaactaggaagttacaccacagaatacgccgcgtctgtgaaaggcagattcaccatctcaagagatgattcaaagaactcactgtatctgcaaatgaacagcctgaaaaccgaggacacggcggtgtactactgcgccagagagcctaaatactggatcgacttcgacctatgggggagaggtaccttggtcaccgtctcctcaggagggggcggatcaggcggaggtggatcgggagggggtggtagcgacatccagatgacccagtctccatcctccctgtctgcatctgtaggagacagagtcaccatcacttgccgggcaagtcagagcattagcagctatttaaattggtatcagcagaaaccagggaaagcccctaagctcctgatctatgctgcatccagtttgcaaagtggggtcccatcaaggttcagtggcagtggatgcggtacagatttcactctcaccatcagcagtctgcaacctgaagattttgcaacttactactgtcagcaaagctacatcgccccttacacttttggcggagggaccaaggttgagatcaaaggtggaggcggttcgggtggagggggatctggtggcggaggtagcggtggcgggggatcaggtggcgggggatcaggtggcgggggatcaggtggcgggggatcaggtggcgggggatcaggtggcgggggatcaggtggcgggggatcaggtggcgggggatcaggtggcgggggatcacccgctgctctgctgcctgcccggggtaccaacatggcccagaagcgtcctgcctgcaccctgaagcctgagtgtgtccagcagctgctggtttgctcccaggaggccaagaagtcagcctactgcccctacagtcactttcctgtgggggctgccctgctcacccaggaggggagaatcttcaaagggtgcaacatagaaaatgcctgctacccgctgggcatctgtgctgaacggaccgctatccagaaggccgtctcagaagggtacaaggatttcagggcaattgctatcgccagtgacatgcaagatgattttatctctccatgtggggcctgcaggcaagtcatgagagagtttggcaccaactggcccgtgtacatgaccaagccggatggtacgtatatt

SEQ ID NO: 762 - DNA, 1158 bp, synthetic construct
  source 1..1158: mol_type = other DNA
gaggtgcagctgttggagtctgggggaggcttggtacagcctggggggtccctgagactctcctgtgcagcctctggattcacctttagcaattatgccatgagctgggtccgccaggctccagggaaggggctggagtgggtctcagctattagtggtagtggtggtagcacatactacgcagactccgtgaagggccggttcaccatctccagagacaattccaagaacacgctgtatctgcaaatgaacagcctgagagccgaggacacggcggtgtactactgcgccaagggccctcctacataccacacaaactactactacatggacgtatggggcaagggtacaactgtcaccgtctcctcaggagggggcggatcaggcggaggtggatcgggagggggtggtagcgacatccagatgacccagtctccatcttccgtgtctgcatctgtaggagacagagtcaccatcacttgtcgggcgagtcagggtattagcagctggttagcctggtatcagcagaaaccagggaaagcccctaagctcctgatctatgctgcatccagtttgcaaagtggggtcccatcaaggttcagcggcagtggatctgggacagatttcactctcaccatcagcagcctgcagcctgaagattttgcaacttattactgtcagcaaacaaatagtttcccttacacttttggcggagggaccaaggttgagatcaaaggtggcgggggatcacccgctgctctgctgcctgcccggggtaccaacatggcccagaagcgtcctgcctgcaccctgaagcctgagtgtgtccagcagctgctggtttgctcccaggaggccaagaagtcagcctactgcccctacagtcactttcctgtgggggctgccctgctcacccaggaggggagaatcttcaaagggtgcaacatagaaaatgcctgctacccgctgggcatctgtgctgaacggaccgctatccagaaggccgtctcagaagggtacaaggatttcagggcaattgctatcgccagtgacatgcaagatgattttatctctccatgtggggcctgcaggcaagtcatgagagagtttggcaccaactggcccgtgtacatgaccaagccggatggtacgtatatt

SEQ ID NO: 763 - DNA, 1188 bp, synthetic construct
  source 1..1188: mol_type = other DNA
gaggtgcagctgttggagtctgggggaggcttggtacagcctggggggtccctgagactctcctgtgcagcctctggattcacctttagcaattatgccatgagctgggtccgccaggctccagggaaggggctggagtgggtctcagctattagtggtagtggtggtagcacatactacgcagactccgtgaagggccggttcaccatctccagagacaattccaagaacacgctgtatctgcaaatgaacagcctgagagccgaggacacggcggtgtactactgcgccaagggccctcctacataccacacaaactactactacatggacgtatggggcaagggtacaactgtcaccgtctcctcaggagggggcggatcaggcggaggtggatcgggagggggtggtagcgacatccagatgacccagtctccatcttccgtgtctgcatctgtaggagacagagtcaccatcacttgtcgggcgagtcagggtattagcagctggttagcctggtatcagcagaaaccagggaaagcccctaagctcctgatctatgctgcatccagtttgcaaagtggggtcccatcaaggttcagcggcagtggatctgggacagatttcactctcaccatcagcagcctgcagcctgaagattttgcaacttattactgtcagcaaacaaatagtttcccttacacttttggcggagggaccaaggttgagatcaaaggagggggcggatcaggcggaggtggatcgggagggggtggtagccccgctgctctgctgcctgcccggggtaccaacatggcccagaagcgtcctgcctgcaccctgaagcctgagtgtgtccagcagctgctggtttgctcccaggaggccaagaagtcagcctactgcccctacagtcactttcctgtgggggctgccctgctcacccaggaggggagaatcttcaaagggtgcaacatagaaaatgcctgctacccgctgggcatctgtgctgaacggaccgctatccagaaggccgtctcagaagggtacaaggatttcagggcaattgctatcgccagtgacatgcaagatgattttatctctccatgtggggcctgcaggcaagtcatgagagagtttggcaccaactggcccgtgtacatgaccaagccggatggtacgtatatt

SEQ ID NO: 764 - DNA, 1203 bp, synthetic construct
  source 1..1203: mol_type = other DNA
gaggtgcagctgttggagtctgggggaggcttggtacagcctggggggtccctgagactctcctgtgcagcctctggattcacctttagcaattatgccatgagctgggtccgccaggctccagggaaggggctggagtgggtctcagctattagtggtagtggtggtagcacatactacgcagactccgtgaagggccggttcaccatctccagagacaattccaagaacacgctgtatctgcaaatgaacagcctgagagccgaggacacggcggtgtactactgcgccaagggccctcctacataccacacaaactactactacatggacgtatggggcaagggtacaactgtcaccgtctcctcaggagggggcggatcaggcggaggtggatcgggagggggtggtagcgacatccagatgacccagtctccatcttccgtgtctgcatctgtaggagacagagtcaccatcacttgtcgggcgagtcagggtattagcagctggttagcctggtatcagcagaaaccagggaaagcccctaagctcctgatctatgctgcatccagtttgcaaagtggggtcccatcaaggttcagcggcagtggatctgggacagatttcactctcaccatcagcagcctgcagcctgaagattttgcaacttattactgtcagcaaacaaatagtttcccttacacttttggcggagggaccaaggttgagatcaaaggtggaggcggttcgggtggagggggatctggtggcggaggtagcggtggcgggggatcacccgctgctctgctgcctgcccggggtaccaacatggcccagaagcgtcctgcctgcaccctgaagcctgagtgtgtccagcagctgctggtttgctcccaggaggccaagaagtcagcctactgcccctacagtcactttcctgtgggggctgccctgctcacccaggaggggagaatcttcaaagggtgcaacatagaaaatgcctgctacccgctgggcatctgtgctgaacggaccgctatccagaaggccgtctcagaagggtacaaggatttcagggcaattgctatcgccagtgacatgcaagatgattttatctctccatgtggggcctgcaggcaagtcatgagagagtttggcaccaactggcccgtgtacatgaccaagccggatggtacgtatatt

SEQ ID NO: 765 - DNA, 1218 bp, synthetic construct
  source 1..1218: mol_type = other DNA
gaggtgcagctgttggagtctgggggaggcttggtacagcctggggggtccctgagactctcctgtgcagcctctggattcacctttagcaattatgccatgagctgggtccgccaggctccagggaaggggctggagtgggtctcagctattagtggtagtggtggtagcacatactacgcagactccgtgaagggccggttcaccatctccagagacaattccaagaacacgctgtatctgcaaatgaacagcctgagagccgaggacacggcggtgtactactgcgccaagggccctcctacataccacacaaactactactacatggacgtatggggcaagggtacaactgtcaccgtctcctcaggagggggcggatcaggcggaggtggatcgggagggggtggtagcgacatccagatgacccagtctccatcttccgtgtctgcatctgtaggagacagagtcaccatcacttgtcgggcgagtcagggtattagcagctggttagcctggtatcagcagaaaccagggaaagcccctaagctcctgatctatgctgcatccagtttgcaaagtggggtcccatcaaggttcagcggcagtggatctgggacagatttcactctcaccatcagcagcctgcagcctgaagattttgcaacttattactgtcagcaaacaaatagtttcccttacacttttggcggagggaccaaggttgagatcaaaggtggaggcggttcgggtggagggggatctggtggcggaggtagcggtggcgggggatcaggtggcgggggatcacccgctgctctgctgcctgcccggggtaccaacatggcccagaagcgtcctgcctgcaccctgaagcctgagtgtgtccagcagctgctggtttgctcccaggaggccaagaagtcagcctactgcccctacagtcactttcctgtgggggctgccctgctcacccaggaggggagaatcttcaaagggtgcaacatagaaaatgcctgctacccgctgggcatctgtgctgaacggaccgctatccagaaggccgtctcagaagggtacaaggatttcagggcaattgctatcgccagtgacatgcaagatgattttatctctccatgtggggcctgcaggcaagtcatgagagagtttggcaccaactggcccgtgtacatgaccaagccggatggtacgtatatt

SEQ ID NO: 766 - DNA, 1233 bp, synthetic construct
  source 1..1233: mol_type = other DNA
gaggtgcagctgttggagtctgggggaggcttggtacagcctggggggtccctgagactctcctgtgcagcctctggattcacctttagcaattatgccatgagctgggtccgccaggctccagggaaggggctggagtgggtctcagctattagtggtagtggtggtagcacatactacgcagactccgtgaagggccggttcaccatctccagagacaattccaagaacacgctgtatctgcaaatgaacagcctgagagccgaggacacggcggtgtactactgcgccaagggccctcctacataccacacaaactactactacatggacgtatggggcaagggtacaactgtcaccgtctcctcaggagggggcggatcaggcggaggtggatcgggagggggtggtagcgacatccagatgacccagtctccatcttccgtgtctgcatctgtaggagacagagtcaccatcacttgtcgggcgagtcagggtattagcagctggttagcctggtatcagcagaaaccagggaaagcccctaagctcctgatctatgctgcatccagtttgcaaagtggggtcccatcaaggttcagcggcagtggatctgggacagatttcactctcaccatcagcagcctgcagcctgaagattttgcaacttattactgtcagcaaacaaatagtttcccttacacttttggcggagggaccaaggttgagatcaaaggtggaggcggttcgggtggagggggatctggtggcggaggtagcggtggcgggggatcaggtggcgggggatcaggtggcgggggatcacccgctgctctgctgcctgcccggggtaccaacatggcccagaagcgtcctgcctgcaccctgaagcctgagtgtgtccagcagctgctggtttgctcccaggaggccaagaagtcagcctactgcccctacagtcactttcctgtgggggctgccctgctcacccaggaggggagaatcttcaaagggtgcaacatagaaaatgcctgctacccgctgggcatctgtgctgaacggaccgctatccagaaggccgtctcagaagggtacaaggatttcagggcaattgctatcgccagtgacatgcaagatgattttatctctccatgtggggcctgcaggcaagtcatgagagagtttggcaccaactggcccgtgtacatgaccaagccggatggtacgtatatt

SEQ ID NO: 767 - DNA, 1248 bp, synthetic construct
  source 1..1248: mol_type = other DNA
gaggtgcagctgttggagtctgggggaggcttggtacagcctggggggtccctgagactctcctgtgcagcctctggattcacctttagcaattatgccatgagctgggtccgccaggctccagggaaggggctggagtgggtctcagctattagtggtagtggtggtagcacatactacgcagactccgtgaagggccggttcaccatctccagagacaattccaagaacacgctgtatctgcaaatgaacagcctgagagccgaggacacggcggtgtactactgcgccaagggccctcctacataccacacaaactactactacatggacgtatggggcaagggtacaactgtcaccgtctcctcaggagggggcggatcaggcggaggtggatcgggagggggtggtagcgacatccagatgacccagtctccatcttccgtgtctgcatctgtaggagacagagtcaccatcacttgtcgggcgagtcagggtattagcagctggttagcctggtatcagcagaaaccagggaaagcccctaagctcctgatctatgctgcatccagtttgcaaagtggggtcccatcaaggttcagcggcagtggatctgggacagatttcactctcaccatcagcagcctgcagcctgaagattttgcaacttattactgtcagcaaacaaatagtttcccttacacttttggcggagggaccaaggttgagatcaaaggtggaggcggttcgggtggagggggatctggtggcggaggtagcggtggcgggggatcaggtggcgggggatcaggtggcgggggatcaggtggcgggggatcacccgctgctctgctgcctgcccggggtaccaacatggcccagaagcgtcctgcctgcaccctgaagcctgagtgtgtccagcagctgctggtttgctcccaggaggccaagaagtcagcctactgcccctacagtcactttcctgtgggggctgccctgctcacccaggaggggagaatcttcaaagggtgcaacatagaaaatgcctgctacccgctgggcatctgtgctgaacggaccgctatccagaaggccgtctcagaagggtacaaggatttcagggcaattgctatcgccagtgacatgcaagatgattttatctctccatgtggggcctgcaggcaagtcatgagagagtttggcaccaactggcccgtgtacatgaccaagccggatggtacgtatatt

SEQ ID NO: 768 - DNA, 1263 bp, synthetic construct
  source 1..1263: mol_type = other DNA
gaggtgcagctgttggagtctgggggaggcttggtacagcctggggggtccctgagactctcctgtgcagcctctggattcacctttagcaattatgccatgagctgggtccgccaggctccagggaaggggctggagtgggtctcagctattagtggtagtggtggtagcacatactacgcagactccgtgaagggccggttcaccatctccagagacaattccaagaacacgctgtatctgcaaatgaacagcctgagagccgaggacacggcggtgtactactgcgccaagggccctcctacataccacacaaactactactacatggacgtatggggcaagggtacaactgtcaccgtctcctcaggagggggcggatcaggcggaggtggatcgggagggggtggtagcgacatccagatgacccagtctccatcttccgtgtctgcatctgtaggagacagagtcaccatcacttgtcgggcgagtcagggtattagcagctggttagcctggtatcagcagaaaccagggaaagcccctaagctcctgatctatgctgcatccagtttgcaaagtggggtcccatcaaggttcagcggcagtggatctgggacagatttcactctcaccatcagcagcctgcagcctgaagattttgcaacttattactgtcagcaaacaaatagtttcccttacacttttggcggagggaccaaggttgagatcaaaggtggaggcggttcgggtggagggggatctggtggcggaggtagcggtggcgggggatcaggtggcgggggatcaggtggcgggggatcaggtggcgggggatcaggtggcgggggatcacccgctgctctgctgcctgcccggggtaccaacatggcccagaagcgtcctgcctgcaccctgaagcctgagtgtgtccagcagctgctggtttgctcccaggaggccaagaagtcagcctactgcccctacagtcactttcctgtgggggctgccctgctcacccaggaggggagaatcttcaaagggtgcaacatagaaaatgcctgctacccgctgggcatctgtgctgaacggaccgctatccagaaggccgtctcagaagggtacaaggatttcagggcaattgctatcgccagtgacatgcaagatgattttatctctccatgtggggcctgcaggcaagtcatgagagagtttggcaccaactggcccgtgtacatgaccaagccggatggtacgtatatt

SEQ ID NO: 769 - DNA, 1278 bp, synthetic construct
  source 1..1278: mol_type = other DNA
gaggtgcagctgttggagtctgggggaggcttggtacagcctggggggtccctgagactctcctgtgcagcctctggattcacctttagcaattatgccatgagctgggtccgccaggctccagggaaggggctggagtgggtctcagctattagtggtagtggtggtagcacatactacgcagactccgtgaagggccggttcaccatctccagagacaattccaagaacacgctgtatctgcaaatgaacagcctgagagccgaggacacggcggtgtactactgcgccaagggccctcctacataccacacaaactactactacatggacgtatggggcaagggtacaactgtcaccgtctcctcaggagggggcggatcaggcggaggtggatcgggagggggtggtagcgacatccagatgacccagtctccatcttccgtgtctgcatctgtaggagacagagtcaccatcacttgtcgggcgagtcagggtattagcagctggttagcctggtatcagcagaaaccagggaaagcccctaagctcctgatctatgctgcatccagtttgcaaagtggggtcccatcaaggttcagcggcagtggatctgggacagatttcactctcaccatcagcagcctgcagcctgaagattttgcaacttattactgtcagcaaacaaatagtttcccttacacttttggcggagggaccaaggttgagatcaaaggtggaggcggttcgggtggagggggatctggtggcggaggtagcggtggcgggggatcaggtggcgggggatcaggtggcgggggatcaggtggcgggggatcaggtggcgggggatcaggtggcgggggatcacccgctgctctgctgcctgcccggggtaccaacatggcccagaagcgtcctgcctgcaccctgaagcctgagtgtgtccagcagctgctggtttgctcccaggaggccaagaagtcagcctactgcccctacagtcactttcctgtgggggctgccctgctcacccaggaggggagaatcttcaaagggtgcaacatagaaaatgcctgctacccgctgggcatctgtgctgaacggaccgctatccagaaggccgtctcagaagggtacaaggatttcagggcaattgctatcgccagtgacatgcaagatgattttatctctccatgtggggcctgcaggcaagtcatgagagagtttggcaccaactggcccgtgtacatgaccaagccggatggtacgtatatt

SEQ ID NO: 770 - DNA, 1293 bp, synthetic construct
  source 1..1293: mol_type = other DNA
gaggtgcagctgttggagtctgggggaggcttggtacagcctggggggtccctgagactctcctgtgcagcctctggattcacctttagcaattatgccatgagctgggtccgccaggctccagggaaggggctggagtgggtctcagctattagtggtagtggtggtagcacatactacgcagactccgtgaagggccggttcaccatctccagagacaattccaagaacacgctgtatctgcaaatgaacagcctgagagccgaggacacggcggtgtactactgcgccaagggccctcctacataccacacaaactactactacatggacgtatggggcaagggtacaactgtcaccgtctcctcaggagggggcggatcaggcggaggtggatcgggagggggtggtagcgacatccagatgacccagtctccatcttccgtgtctgcatctgtaggagacagagtcaccatcacttgtcgggcgagtcagggtattagcagctggttagcctggtatcagcagaaaccagggaaagcccctaagctcctgatctatgctgcatccagtttgcaaagtggggtcccatcaaggttcagcggcagtggatctgggacagatttcactctcaccatcagcagcctgcagcctgaagattttgcaacttattactgtcagcaaacaaatagtttcccttacacttttggcggagggaccaaggttgagatcaaaggtggaggcggttcgggtggagggggatctggtggcggaggtagcggtggcgggggatcaggtggcgggggatcaggtggcgggggatcaggtggcgggggatcaggtggcgggggatcaggtggcgggggatcaggtggcgggggatcacccgctgctctgctgcctgcccggggtaccaacatggcccagaagcgtcctgcctgcaccctgaagcctgagtgtgtccagcagctgctggtttgctcccaggaggccaagaagtcagcctactgcccctacagtcactttcctgtgggggctgccctgctcacccaggaggggagaatcttcaaagggtgcaacatagaaaatgcctgctacccgctgggcatctgtgctgaacggaccgctatccagaaggccgtctcagaagggtacaaggatttcagggcaattgctatcgccagtgacatgcaagatgattttatctctccatgtggggcctgcaggcaagtcatgagagagtttggcaccaactggcccgtgtacatgaccaagccggatggtacgtatatt

SEQ ID NO: 771 - DNA, 1308 bp, synthetic construct
  source 1..1308: mol_type = other DNA
gaggtgcagctgttggagtctgggggaggcttggtacagcctggggggtccctgagactctcctgtgcagcctctggattcacctttagcaattatgccatgagctgggtccgccaggctccagggaaggggctggagtgggtctcagctattagtggtagtggtggtagcacatactacgcagactccgtgaagggccggttcaccatctccagagacaattccaagaacacgctgtatctgcaaatgaacagcctgagagccgaggacacggcggtgtactactgcgccaagggccctcctacataccacacaaactactactacatggacgtatggggcaagggtacaactgtcaccgtctcctcaggagggggcggatcaggcggaggtggatcgggagggggtggtagcgacatccagatgacccagtctccatcttccgtgtctgcatctgtaggagacagagtcaccatcacttgtcgggcgagtcagggtattagcagctggttagcctggtatcagcagaaaccagggaaagcccctaagctcctgatctatgctgcatccagtttgcaaagtggggtcccatcaaggttcagcggcagtggatctgggacagatttcactctcaccatcagcagcctgcagcctgaagattttgcaacttattactgtcagcaaacaaatagtttcccttacacttttggcggagggaccaaggttgagatcaaaggtggaggcggttcgggtggagggggatctggtggcggaggtagcggtggcgggggatcaggtggcgggggatcaggtggcgggggatcaggtggcgggggatcaggtggcgggggatcaggtggcgggggatcaggtggcgggggatcaggtggcgggggatcacccgctgctctgctgcctgcccggggtaccaacatggcccagaagcgtcctgcctgcaccctgaagcctgagtgtgtccagcagctgctggtttgctcccaggaggccaagaagtcagcctactgcccctacagtcactttcctgtgggggctgccctgctcacccaggaggggagaatcttcaaagggtgcaacatagaaaatgcctgctacccgctgggcatctgtgctgaacggaccgctatccagaaggccgtctcagaagggtacaaggatttcagggcaattgctatcgccagtgacatgcaagatgattttatctctccatgtggggcctgcaggcaagtcatgagagagtttggcaccaactggcccgtgtacatgaccaagccggatggtacgtatatt

SEQ ID NO: 772 - DNA, 1323 bp, synthetic construct
  source 1..1323: mol_type = other DNA
gaggtgcagctgttggagtctgggggaggcttggtacagcctggggggtccctgagactctcctgtgcagcctctggattcacctttagcaattatgccatgagctgggtccgccaggctccagggaaggggctggagtgggtctcagctattagtggtagtggtggtagcacatactacgcagactccgtgaagggccggttcaccatctccagagacaattccaagaacacgctgtatctgcaaatgaacagcctgagagccgaggacacggcggtgtactactgcgccaagggccctcctacataccacacaaactactactacatggacgtatggggcaagggtacaactgtcaccgtctcctcaggagggggcggatcaggcggaggtggatcgggagggggtggtagcgacatccagatgacccagtctccatcttccgtgtctgcatctgtaggagacagagtcaccatcacttgtcgggcgagtcagggtattagcagctggttagcctggtatcagcagaaaccagggaaagcccctaagctcctgatctatgctgcatccagtttgcaaagtggggtcccatcaaggttcagcggcagtggatctgggacagatttcactctcaccatcagcagcctgcagcctgaagattttgcaacttattactgtcagcaaacaaatagtttcccttacacttttggcggagggaccaaggttgagatcaaaggtggaggcggttcgggtggagggggatctggtggcggaggtagcggtggcgggggatcaggtggcgggggatcaggtggcgggggatcaggtggcgggggatcaggtggcgggggatcaggtggcgggggatcaggtggcgggggatcaggtggcgggggatcaggtggcgggggatcacccgctgctctgctgcctgcccggggtaccaacatggcccagaagcgtcctgcctgcaccctgaagcctgagtgtgtccagcagctgctggtttgctcccaggaggccaagaagtcagcctactgcccctacagtcactttcctgtgggggctgccctgctcacccaggaggggagaatcttcaaagggtgcaacatagaaaatgcctgctacccgctgggcatctgtgctgaacggaccgctatccagaaggccgtctcagaagggtacaaggatttcagggcaattgctatcgccagtgacatgcaagatgattttatctctccatgtggggcctgcaggcaagtcatgagagagtttggcaccaactggcccgtgtacatgaccaagccggatggtacgtatatt

SEQ ID NO: 773 - DNA, 1158 bp, synthetic construct
  source 1..1158: mol_type = other DNA
gaggtgcagctgttggagtctgggggaggcttggtacagcctggggggtccctgagactctcctgtgcagcctctggattcacctttagcagctatgtcatgatctgggtccgccaggctccagggaaggggctggagtgggtctcaagcattagtggtgacagcgtaacaacatactacgcagactccgtgaagggccggttcaccatctccagagacaattccaagaacacgctgtatctgcaaatgaacagcctgagagccgaggacacggcggtgtactactgcgccaagggccctcctacataccacacaaactactactacatggacgtatggggcaagggtacaactgtcaccgtctcctcaggagggggcggatcaggcggaggtggatcgggagggggtggtagcgacatccagatgacccagtctccatcttccgtgtctgcatctgtaggagacagagtcaccatcacttgtcgggcgagtcagggtattagcagctggttagcctggtatcagcagaaaccagggaaagcccctaagctcctgatctatgctgcatccagtttgcaaagtggggtcccatcaaggttcagcggcagtggatctgggacagatttcactctcaccatcagcagcctgcagcctgaagattttgcaacttattactgtcagcaaacaaatagtttcccttacacttttggcggagggaccaaggttgagatcaaaggtggcgggggatcacccgctgctctgctgcctgcccggggtaccaacatggcccagaagcgtcctgcctgcaccctgaagcctgagtgtgtccagcagctgctggtttgctcccaggaggccaagaagtcagcctactgcccctacagtcactttcctgtgggggctgccctgctcacccaggaggggagaatcttcaaagggtgcaacatagaaaatgcctgctacccgctgggcatctgtgctgaacggaccgctatccagaaggccgtctcagaagggtacaaggatttcagggcaattgctatcgccagtgacatgcaagatgattttatctctccatgtggggcctgcaggcaagtcatgagagagtttggcaccaactggcccgtgtacatgaccaagccggatggtacgtatatt

SEQ ID NO: 774 - DNA, 1188 bp, synthetic construct
  source 1..1188: mol_type = other DNA
gaggtgcagctgttggagtctgggggaggcttggtacagcctggggggtccctgagactctcctgtgcagcctctggattcacctttagcagctatgtcatgatctgggtccgccaggctccagggaaggggctggagtgggtctcaagcattagtggtgacagcgtaacaacatactacgcagactccgtgaagggccggttcaccatctccagagacaattccaagaacacgctgtatctgcaaatgaacagcctgagagccgaggacacggcggtgtactactgcgccaagggccctcctacataccacacaaactactactacatggacgtatggggcaagggtacaactgtcaccgtctcctcaggagggggcggatcaggcggaggtggatcgggagggggtggtagcgacatccagatgacccagtctccatcttccgtgtctgcatctgtaggagacagagtcaccatcacttgtcgggcgagtcagggtattagcagctggttagcctggtatcagcagaaaccagggaaagcccctaagctcctgatctatgctgcatccagtttgcaaagtggggtcccatcaaggttcagcggcagtggatctgggacagatttcactctcaccatcagcagcctgcagcctgaagattttgcaacttattactgtcagcaaacaaatagtttcccttacacttttggcggagggaccaaggttgagatcaaaggagggggcggatcaggcggaggtggatcgggagggggtggtagccccgctgctctgctgcctgcccggggtaccaacatggcccagaagcgtcctgcctgcaccctgaagcctgagtgtgtccagcagctgctggtttgctcccaggaggccaagaagtcagcctactgcccctacagtcactttcctgtgggggctgccctgctcacccaggaggggagaatcttcaaagggtgcaacatagaaaatgcctgctacccgctgggcatctgtgctgaacggaccgctatccagaaggccgtctcagaagggtacaaggatttcagggcaattgctatcgccagtgacatgcaagatgattttatctctccatgtggggcctgcaggcaagtcatgagagagtttggcaccaactggcccgtgtacatgaccaagccggatggtacgtatatt

SEQ ID NO: 775 - DNA, 1203 bp, synthetic construct
  source 1..1203: mol_type = other DNA
gaggtgcagctgttggagtctgggggaggcttggtacagcctggggggtccctgagactctcctgtgcagcctctggattcacctttagcagctatgtcatgatctgggtccgccaggctccagggaaggggctggagtgggtctcaagcattagtggtgacagcgtaacaacatactacgcagactccgtgaagggccggttcaccatctccagagacaattccaagaacacgctgtatctgcaaatgaacagcctgagagccgaggacacggcggtgtactactgcgccaagggccctcctacataccacacaaactactactacatggacgtatggggcaagggtacaactgtcaccgtctcctcaggagggggcggatcaggcggaggtggatcgggagggggtggtagcgacatccagatgacccagtctccatcttccgtgtctgcatctgtaggagacagagtcaccatcacttgtcgggcgagtcagggtattagcagctggttagcctggtatcagcagaaaccagggaaagcccctaagctcctgatctatgctgcatccagtttgcaaagtggggtcccatcaaggttcagcggcagtggatctgggacagatttcactctcaccatcagcagcctgcagcctgaagattttgcaacttattactgtcagcaaacaaatagtttcccttacacttttggcggagggaccaaggttgagatcaaaggtggaggcggttcgggtggagggggatctggtggcggaggtagcggtggcgggggatcacccgctgctctgctgcctgcccggggtaccaacatggcccagaagcgtcctgcctgcaccctgaagcctgagtgtgtccagcagctgctggtttgctcccaggaggccaagaagtcagcctactgcccctacagtcactttcctgtgggggctgccctgctcacccaggaggggagaatcttcaaagggtgcaacatagaaaatgcctgctacccgctgggcatctgtgctgaacggaccgctatccagaaggccgtctcagaagggtacaaggatttcagggcaattgctatcgccagtgacatgcaagatgattttatctctccatgtggggcctgcaggcaagtcatgagagagtttggcaccaactggcccgtgtacatgaccaagccggatggtacgtatatt

SEQ ID NO: 776 - DNA, 1218 bp, synthetic construct
  source 1..1218: mol_type = other DNA
gaggtgcagctgttggagtctgggggaggcttggtacagcctggggggtccctgagactctcctgtgcagcctctggattcacctttagcagctatgtcatgatctgggtccgccaggctccagggaaggggctggagtgggtctcaagcattagtggtgacagcgtaacaacatactacgcagactccgtgaagggccggttcaccatctccagagacaattccaagaacacgctgtatctgcaaatgaacagcctgagagccgaggacacggcggtgtactactgcgccaagggccctcctacataccacacaaactactactacatggacgtatggggcaagggtacaactgtcaccgtctcctcaggagggggcggatcaggcggaggtggatcgggagggggtggtagcgacatccagatgacccagtctccatcttccgtgtctgcatctgtaggagacagagtcaccatcacttgtcgggcgagtcagggtattagcagctggttagcctggtatcagcagaaaccagggaaagcccctaagctcctgatctatgctgcatccagtttgcaaagtggggtcccatcaaggttcagcggcagtggatctgggacagatttcactctcaccatcagcagcctgcagcctgaagattttgcaacttattactgtcagcaaacaaatagtttcccttacacttttggcggagggaccaaggttgagatcaaaggtggaggcggttcgggtggagggggatctggtggcggaggtagcggtggcgggggatcaggtggcgggggatcacccgctgctctgctgcctgcccggggtaccaacatggcccagaagcgtcctgcctgcaccctgaagcctgagtgtgtccagcagctgctggtttgctcccaggaggccaagaagtcagcctactgcccctacagtcactttcctgtgggggctgccctgctcacccaggaggggagaatcttcaaagggtgcaacatagaaaatgcctgctacccgctgggcatctgtgctgaacggaccgctatccagaaggccgtctcagaagggtacaaggatttcagggcaattgctatcgccagtgacatgcaagatgattttatctctccatgtggggcctgcaggcaagtcatgagagagtttggcaccaactggcccgtgtacatgaccaagccggatggtacgtatatt

SEQ ID NO: 777 - DNA, 1233 bp, synthetic construct
  source 1..1233: mol_type = other DNA
gaggtgcagctgttggagtctgggggaggcttggtacagcctggggggtccctgagactctcctgtgcagcctctggattcacctttagcagctatgtcatgatctgggtccgccaggctccagggaaggggctggagtgggtctcaagcattagtggtgacagcgtaacaacatactacgcagactccgtgaagggccggttcaccatctccagagacaattccaagaacacgctgtatctgcaaatgaacagcctgagagccgaggacacggcggtgtactactgcgccaagggccctcctacataccacacaaactactactacatggacgtatggggcaagggtacaactgtcaccgtctcctcaggagggggcggatcaggcggaggtggatcgggagggggtggtagcgacatccagatgacccagtctccatcttccgtgtctgcatctgtaggagacagagtcaccatcacttgtcgggcgagtcagggtattagcagctggttagcctggtatcagcagaaaccagggaaagcccctaagctcctgatctatgctgcatccagtttgcaaagtggggtcccatcaaggttcagcggcagtggatctgggacagatttcactctcaccatcagcagcctgcagcctgaagattttgcaacttattactgtcagcaaacaaatagtttcccttacacttttggcggagggaccaaggttgagatcaaaggtggaggcggttcgggtggagggggatctggtggcggaggtagcggtggcgggggatcaggtggcgggggatcaggtggcgggggatcacccgctgctctgctgcctgcccggggtaccaacatggcccagaagcgtcctgcctgcaccctgaagcctgagtgtgtccagcagctgctggtttgctcccaggaggccaagaagtcagcctactgcccctacagtcactttcctgtgggggctgccctgctcacccaggaggggagaatcttcaaagggtgcaacatagaaaatgcctgctacccgctgggcatctgtgctgaacggaccgctatccagaaggccgtctcagaagggtacaaggatttcagggcaattgctatcgccagtgacatgcaagatgattttatctctccatgtggggcctgcaggcaagtcatgagagagtttggcaccaactggcccgtgtacatgaccaagccggatggtacgtatatt

SEQ ID NO: 778 - DNA, 1248 bp, synthetic construct
  source 1..1248: mol_type = other DNA
gaggtgcagctgttggagtctgggggaggcttggtacagcctggggggtccctgagactctcctgtgcagcctctggattcacctttagcagctatgtcatgatctgggtccgccaggctccagggaaggggctggagtgggtctcaagcattagtggtgacagcgtaacaacatactacgcagactccgtgaagggccggttcaccatctccagagacaattccaagaacacgctgtatctgcaaatgaacagcctgagagccgaggacacggcggtgtactactgcgccaagggccctcctacataccacacaaactactactacatggacgtatggggcaagggtacaactgtcaccgtctcctcaggagggggcggatcaggcggaggtggatcgggagggggtggtagcgacatccagatgacccagtctccatcttccgtgtctgcatctgtaggagacagagtcaccatcacttgtcgggcgagtcagggtattagcagctggttagcctggtatcagcagaaaccagggaaagcccctaagctcctgatctatgctgcatccagtttgcaaagtggggtcccatcaaggttcagcggcagtggatctgggacagatttcactctcaccatcagcagcctgcagcctgaagattttgcaacttattactgtcagcaaacaaatagtttcccttacacttttggcggagggaccaaggttgagatcaaaggtggaggcggttcgggtggagggggatctggtggcggaggtagcggtggcgggggatcaggtggcgggggatcaggtggcgggggatcaggtggcgggggatcacccgctgctctgctgcctgcccggggtaccaacatggcccagaagcgtcctgcctgcaccctgaagcctgagtgtgtccagcagctgctggtttgctcccaggaggccaagaagtcagcctactgcccctacagtcactttcctgtgggggctgccctgctcacccaggaggggagaatcttcaaagggtgcaacatagaaaatgcctgctacccgctgggcatctgtgctgaacggaccgctatccagaaggccgtctcagaagggtacaaggatttcagggcaattgctatcgccagtgacatgcaagatgattttatctctccatgtggggcctgcaggcaagtcatgagagagtttggcaccaactggcccgtgtacatgaccaagccggatggtacgtatatt

SEQ ID NO: 779 - DNA, 1263 bp, synthetic construct
  source 1..1263: mol_type = other DNA
gaggtgcagctgttggagtctgggggaggcttggtacagcctggggggtccctgagactctcctgtgcagcctctggattcacctttagcagctatgtcatgatctgggtccgccaggctccagggaaggggctggagtgggtctcaagcattagtggtgacagcgtaacaacatactacgcagactccgtgaagggccggttcaccatctccagagacaattccaagaacacgctgtatctgcaaatgaacagcctgagagccgaggacacggcggtgtactactgcgccaagggccctcctacataccacacaaactactactacatggacgtatggggcaagggtacaactgtcaccgtctcctcaggagggggcggatcaggcggaggtggatcgggagggggtggtagcgacatccagatgacccagtctccatcttccgtgtctgcatctgtaggagacagagtcaccatcacttgtcgggcgagtcagggtattagcagctggttagcctggtatcagcagaaaccagggaaagcccctaagctcctgatctatgctgcatccagtttgcaaagtggggtcccatcaaggttcagcggcagtggatctgggacagatttcactctcaccatcagcagcctgcagcctgaagattttgcaacttattactgtcagcaaacaaatagtttcccttacacttttggcggagggaccaaggttgagatcaaaggtggaggcggttcgggtggagggggatctggtggcggaggtagcggtggcgggggatcaggtggcgggggatcaggtggcgggggatcaggtggcgggggatcaggtggcgggggatcacccgctgctctgctgcctgcccggggtaccaacatggcccagaagcgtcctgcctgcaccctgaagcctgagtgtgtccagcagctgctggtttgctcccaggaggccaagaagtcagcctactgcccctacagtcactttcctgtgggggctgccctgctcacccaggaggggagaatcttcaaagggtgcaacatagaaaatgcctgctacccgctgggcatctgtgctgaacggaccgctatccagaaggccgtctcagaagggtacaaggatttcagggcaattgctatcgccagtgacatgcaagatgattttatctctccatgtggggcctgcaggcaagtcatgagagagtttggcaccaactggcccgtgtacatgaccaagccggatggtacgtatatt

SEQ ID NO: 780 - DNA, 1278 bp, synthetic construct
  source 1..1278: mol_type = other DNA
gaggtgcagctgttggagtctgggggaggcttggtacagcctggggggtccctgagactctcctgtgcagcctctggattcacctttagcagctatgtcatgatctgggtccgccaggctccagggaaggggctggagtgggtctcaagcattagtggtgacagcgtaacaacatactacgcagactccgtgaagggccggttcaccatctccagagacaattccaagaacacgctgtatctgcaaatgaacagcctgagagccgaggacacggcggtgtactactgcgccaagggccctcctacataccacacaaactactactacatggacgtatggggcaagggtacaactgtcaccgtctcctcaggagggggcggatcaggcggaggtggatcgggagggggtggtagcgacatccagatgacccagtctccatcttccgtgtctgcatctgtaggagacagagtcaccatcacttgtcgggcgagtcagggtattagcagctggttagcctggtatcagcagaaaccagggaaagcccctaagctcctgatctatgctgcatccagtttgcaaagtggggtcccatcaaggttcagcggcagtggatctgggacagatttcactctcaccatcagcagcctgcagcctgaagattttgcaacttattactgtcagcaaacaaatagtttcccttacacttttggcggagggaccaaggttgagatcaaaggtggaggcggttcgggtggagggggatctggtggcggaggtagcggtggcgggggatcaggtggcgggggatcaggtggcgggggatcaggtggcgggggatcaggtggcgggggatcaggtggcgggggatcacccgctgctctgctgcctgcccggggtaccaacatggcccagaagcgtcctgcctgcaccctgaagcctgagtgtgtccagcagctgctggtttgctcccaggaggccaagaagtcagcctactgcccctacagtcactttcctgtgggggctgccctgctcacccaggaggggagaatcttcaaagggtgcaacatagaaaatgcctgctacccgctgggcatctgtgctgaacggaccgctatccagaaggccgtctcagaagggtacaaggatttcagggcaattgctatcgccagtgacatgcaagatgattttatctctccatgtggggcctgcaggcaagtcatgagagagtttggcaccaactggcccgtgtacatgaccaagccggatggtacgtatatt

SEQ ID NO: 781 - DNA, 1293 bp, synthetic construct
  source 1..1293: mol_type = other DNA
gaggtgcagctgttggagtctgggggaggcttggtacagcctggggggtccctgagactctcctgtgcagcctctggattcacctttagcagctatgtcatgatctgggtccgccaggctccagggaaggggctggagtgggtctcaagcattagtggtgacagcgtaacaacatactacgcagactccgtgaagggccggttcaccatctccagagacaattccaagaacacgctgtatctgcaaatgaacagcctgagagccgaggacacggcggtgtactactgcgccaagggccctcctacataccacacaaactactactacatggacgtatggggcaagggtacaactgtcaccgtctcctcaggagggggcggatcaggcggaggtggatcgggagggggtggtagcgacatccagatgacccagtctccatcttccgtgtctgcatctgtaggagacagagtcaccatcacttgtcgggcgagtcagggtattagcagctggttagcctggtatcagcagaaaccagggaaagcccctaagctcctgatctatgctgcatccagtttgcaaagtggggtcccatcaaggttcagcggcagtggatctgggacagatttcactctcaccatcagcagcctgcagcctgaagattttgcaacttattactgtcagcaaacaaatagtttcccttacacttttggcggagggaccaaggttgagatcaaaggtggaggcggttcgggtggagggggatctggtggcggaggtagcggtggcgggggatcaggtggcgggggatcaggtggcgggggatcaggtggcgggggatcaggtggcgggggatcaggtggcgggggatcaggtggcgggggatcacccgctgctctgctgcctgcccggggtaccaacatggcccagaagcgtcctgcctgcaccctgaagcctgagtgtgtccagcagctgctggtttgctcccaggaggccaagaagtcagcctactgcccctacagtcactttcctgtgggggctgccctgctcacccaggaggggagaatcttcaaagggtgcaacatagaaaatgcctgctacccgctgggcatctgtgctgaacggaccgctatccagaaggccgtctcagaagggtacaaggatttcagggcaattgctatcgccagtgacatgcaagatgattttatctctccatgtggggcctgcaggcaagtcatgagagagtttggcaccaactggcccgtgtacatgaccaagccggatggtacgtatatt

SEQ ID NO: 782 - DNA, 1308 bp, synthetic construct
  source 1..1308: mol_type = other DNA
gaggtgcagctgttggagtctgggggaggcttggtacagcctggggggtccctgagactctcctgtgcagcctctggattcacctttagcagctatgtcatgatctgggtccgccaggctccagggaaggggctggagtgggtctcaagcattagtggtgacagcgtaacaacatactacgcagactccgtgaagggccggttcaccatctccagagacaattccaagaacacgctgtatctgcaaatgaacagcctgagagccgaggacacggcggtgtactactgcgccaagggccctcctacataccacacaaactactactacatggacgtatggggcaagggtacaactgtcaccgtctcctcaggagggggcggatcaggcggaggtggatcgggagggggtggtagcgacatccagatgacccagtctccatcttccgtgtctgcatctgtaggagacagagtcaccatcacttgtcgggcgagtcagggtattagcagctggttagcctggtatcagcagaaaccagggaaagcccctaagctcctgatctatgctgcatccagtttgcaaagtggggtcccatcaaggttcagcggcagtggatctgggacagatttcactctcaccatcagcagcctgcagcctgaagattttgcaacttattactgtcagcaaacaaatagtttcccttacacttttggcggagggaccaaggttgagatcaaaggtggaggcggttcgggtggagggggatctggtggcggaggtagcggtggcgggggatcaggtggcgggggatcaggtggcgggggatcaggtggcgggggatcaggtggcgggggatcaggtggcgggggatcaggtggcgggggatcaggtggcgggggatcacccgctgctctgctgcctgcccggggtaccaacatggcccagaagcgtcctgcctgcaccctgaagcctgagtgtgtccagcagctgctggtttgctcccaggaggccaagaagtcagcctactgcccctacagtcactttcctgtgggggctgccctgctcacccaggaggggagaatcttcaaagggtgcaacatagaaaatgcctgctacccgctgggcatctgtgctgaacggaccgctatccagaaggccgtctcagaagggtacaaggatttcagggcaattgctatcgccagtgacatgcaagatgattttatctctccatgtggggcctgcaggcaagtcatgagagagtttggcaccaactggcccgtgtacatgaccaagccggatggtacgtatatt

SEQ ID NO: 783 - DNA, 1323 bp, synthetic construct
  source 1..1323: mol_type = other DNA
gaggtgcagctgttggagtctgggggaggcttggtacagcctggggggtccctgagactctcctgtgcagcctctggattcacctttagcagctatgtcatgatctgggtccgccaggctccagggaaggggctggagtgggtctcaagcattagtggtgacagcgtaacaacatactacgcagactccgtgaagggccggttcaccatctccagagacaattccaagaacacgctgtatctgcaaatgaacagcctgagagccgaggacacggcggtgtactactgcgccaagggccctcctacataccacacaaactactactacatggacgtatggggcaagggtacaactgtcaccgtctcctcaggagggggcggatcaggcggaggtggatcgggagggggtggtagcgacatccagatgacccagtctccatcttccgtgtctgcatctgtaggagacagagtcaccatcacttgtcgggcgagtcagggtattagcagctggttagcctggtatcagcagaaaccagggaaagcccctaagctcctgatctatgctgcatccagtttgcaaagtggggtcccatcaaggttcagcggcagtggatctgggacagatttcactctcaccatcagcagcctgcagcctgaagattttgcaacttattactgtcagcaaacaaatagtttcccttacacttttggcggagggaccaaggttgagatcaaaggtggaggcggttcgggtggagggggatctggtggcggaggtagcggtggcgggggatcaggtggcgggggatcaggtggcgggggatcaggtggcgggggatcaggtggcgggggatcaggtggcgggggatcaggtggcgggggatcaggtggcgggggatcaggtggcgggggatcacccgctgctctgctgcctgcccggggtaccaacatggcccagaagcgtcctgcctgcaccctgaagcctgagtgtgtccagcagctgctggtttgctcccaggaggccaagaagtcagcctactgcccctacagtcactttcctgtgggggctgccctgctcacccaggaggggagaatcttcaaagggtgcaacatagaaaatgcctgctacccgctgggcatctgtgctgaacggaccgctatccagaaggccgtctcagaagggtacaaggatttcagggcaattgctatcgccagtgacatgcaagatgattttatctctccatgtggggcctgcaggcaagtcatgagagagtttggcaccaactggcccgtgtacatgaccaagccggatggtacgtatatt

SEQ ID NO: 784 - DNA, 1152 bp, synthetic construct
  source 1..1152: mol_type = other DNA
gaggtgcagctggtggagtctgggggaggcttggtccagcctggagggtccctgagactctcctgtgcagcctctggattcaccttcagtgaccactacatggactgggtccgccaggctccagggaaggggctggagtgggttggccgtactagaaacaaagctagtagttacaccacagaatacgccgcgtctgtgaaaggcagattcaccatctcaagagatgattcaaagaactcactgtatctgcaaatgaacagcctgaaaaccgaggacacggcggtgtactactgcgccagagagcctaaatactggatcgacttcgacctatgggggagaggtaccttggtcaccgtctcctcaggagggggcggatcaggcggaggtggatcgggagggggtggtagcgacatccagatgacccagtctccatcctccctgtctgcatctgtaggagacagagtcaccatcacttgccgggcaagtcagagcattagcagctatttaaattggtatcagcagaaaccagggaaagcccctaagctcctgatctatgctgcatccagtttgcaaagtggggtcccatcaaggttcagtggcagtggatctgggacagatttcactctcaccatcagcagtctgcaacctgaagattttgcaacttactactgtcagcaaagctacatcgccccttacacttttggcggagggaccaaggttgagatcaaaggtggcgggggatcacccgctgctctgctgcctgcccggggtaccaacatggcccagaagcgtcctgcctgcaccctgaagcctgagtgtgtccagcagctgctggtttgctcccaggaggccaagaagtcagcctactgcccctacagtcactttcctgtgggggctgccctgctcacccaggaggggagaatcttcaaagggtgcaacatagaaaatgcctgctacccgctgggcatctgtgctgaacggaccgctatccagaaggccgtctcagaagggtacaaggatttcagggcaattgctatcgccagtgacatgcaagatgattttatctctccatgtggggcctgcaggcaagtcatgagagagtttggcaccaactggcccgtgtacatgaccaagccggatggtacgtatatt

SEQ ID NO: 785 - DNA, 1182 bp, synthetic construct
  source 1..1182: mol_type = other DNA
gaggtgcagctggtggagtctgggggaggcttggtccagcctggagggtccctgagactctcctgtgcagcctctggattcaccttcagtgaccactacatggactgggtccgccaggctccagggaaggggctggagtgggttggccgtactagaaacaaagctagtagttacaccacagaatacgccgcgtctgtgaaaggcagattcaccatctcaagagatgattcaaagaactcactgtatctgcaaatgaacagcctgaaaaccgaggacacggcggtgtactactgcgccagagagcctaaatactggatcgacttcgacctatgggggagaggtaccttggtcaccgtctcctcaggagggggcggatcaggcggaggtggatcgggagggggtggtagcgacatccagatgacccagtctccatcctccctgtctgcatctgtaggagacagagtcaccatcacttgccgggcaagtcagagcattagcagctatttaaattggtatcagcagaaaccagggaaagcccctaagctcctgatctatgctgcatccagtttgcaaagtggggtcccatcaaggttcagtggcagtggatctgggacagatttcactctcaccatcagcagtctgcaacctgaagattttgcaacttactactgtcagcaaagctacatcgccccttacacttttggcggagggaccaaggttgagatcaaaggagggggcggatcaggcggaggtggatcgggagggggtggtagccccgctgctctgctgcctgcccggggtaccaacatggcccagaagcgtcctgcctgcaccctgaagcctgagtgtgtccagcagctgctggtttgctcccaggaggccaagaagtcagcctactgcccctacagtcactttcctgtgggggctgccctgctcacccaggaggggagaatcttcaaagggtgcaacatagaaaatgcctgctacccgctgggcatctgtgctgaacggaccgctatccagaaggccgtctcagaagggtacaaggatttcagggcaattgctatcgccagtgacatgcaagatgattttatctctccatgtggggcctgcaggcaagtcatgagagagtttggcaccaactggcccgtgtacatgaccaagccggatggtacgtatatt

SEQ ID NO: 786 - DNA, 1197 bp, synthetic construct
  source 1..1197: mol_type = other DNA
gaggtgcagctggtggagtctgggggaggcttggtccagcctggagggtccctgagactctcctgtgcagcctctggattcaccttcagtgaccactacatggactgggtccgccaggctccagggaaggggctggagtgggttggccgtactagaaacaaagctagtagttacaccacagaatacgccgcgtctgtgaaaggcagattcaccatctcaagagatgattcaaagaactcactgtatctgcaaatgaacagcctgaaaaccgaggacacggcggtgtactactgcgccagagagcctaaatactggatcgacttcgacctatgggggagaggtaccttggtcaccgtctcctcaggagggggcggatcaggcggaggtggatcgggagggggtggtagcgacatccagatgacccagtctccatcctccctgtctgcatctgtaggagacagagtcaccatcacttgccgggcaagtcagagcattagcagctatttaaattggtatcagcagaaaccagggaaagcccctaagctcctgatctatgctgcatccagtttgcaaagtggggtcccatcaaggttcagtggcagtggatctgggacagatttcactctcaccatcagcagtctgcaacctgaagattttgcaacttactactgtcagcaaagctacatcgccccttacacttttggcggagggaccaaggttgagatcaaaggtggaggcggttcgggtggagggggatctggtggcggaggtagcggtggcgggggatcacccgctgctctgctgcctgcccggggtaccaacatggcccagaagcgtcctgcctgcaccctgaagcctgagtgtgtccagcagctgctggtttgctcccaggaggccaagaagtcagcctactgcccctacagtcactttcctgtgggggctgccctgctcacccaggaggggagaatcttcaaagggtgcaacatagaaaatgcctgctacccgctgggcatctgtgctgaacggaccgctatccagaaggccgtctcagaagggtacaaggatttcagggcaattgctatcgccagtgacatgcaagatgattttatctctccatgtggggcctgcaggcaagtcatgagagagtttggcaccaactggcccgtgtacatgaccaagccggatggtacgtatatt

SEQ ID NO: 787 - DNA, 1212 bp, synthetic construct
  source 1..1212: mol_type = other DNA
gaggtgcagctggtggagtctgggggaggcttggtccagcctggagggtccctgagactctcctgtgcagcctctggattcaccttcagtgaccactacatggactgggtccgccaggctccagggaaggggctggagtgggttggccgtactagaaacaaagctagtagttacaccacagaatacgccgcgtctgtgaaaggcagattcaccatctcaagagatgattcaaagaactcactgtatctgcaaatgaacagcctgaaaaccgaggacacggcggtgtactactgcgccagagagcctaaatactggatcgacttcgacctatgggggagaggtaccttggtcaccgtctcctcaggagggggcggatcaggcggaggtggatcgggagggggtggtagcgacatccagatgacccagtctccatcctccctgtctgcatctgtaggagacagagtcaccatcacttgccgggcaagtcagagcattagcagctatttaaattggtatcagcagaaaccagggaaagcccctaagctcctgatctatgctgcatccagtttgcaaagtggggtcccatcaaggttcagtggcagtggatctgggacagatttcactctcaccatcagcagtctgcaacctgaagattttgcaacttactactgtcagcaaagctacatcgccccttacacttttggcggagggaccaaggttgagatcaaaggtggaggcggttcgggtggagggggatctggtggcggaggtagcggtggcgggggatcaggtggcgggggatcacccgctgctctgctgcctgcccggggtaccaacatggcccagaagcgtcctgcctgcaccctgaagcctgagtgtgtccagcagctgctggtttgctcccaggaggccaagaagtcagcctactgcccctacagtcactttcctgtgggggctgccctgctcacccaggaggggagaatcttcaaagggtgcaacatagaaaatgcctgctacccgctgggcatctgtgctgaacggaccgctatccagaaggccgtctcagaagggtacaaggatttcagggcaattgctatcgccagtgacatgcaagatgattttatctctccatgtggggcctgcaggcaagtcatgagagagtttggcaccaactggcccgtgtacatgaccaagccggatggtacgtatatt

SEQ ID NO: 788 - DNA, 1227 bp, synthetic construct
  source 1..1227: mol_type = other DNA
gaggtgcagctggtggagtctgggggaggcttggtccagcctggagggtccctgagactctcctgtgcagcctctggattcaccttcagtgaccactacatggactgggtccgccaggctccagggaaggggctggagtgggttggccgtactagaaacaaagctagtagttacaccacagaatacgccgcgtctgtgaaaggcagattcaccatctcaagagatgattcaaagaactcactgtatctgcaaatgaacagcctgaaaaccgaggacacggcggtgtactactgcgccagagagcctaaatactggatcgacttcgacctatgggggagaggtaccttggtcaccgtctcctcaggagggggcggatcaggcggaggtggatcgggagggggtggtagcgacatccagatgacccagtctccatcctccctgtctgcatctgtaggagacagagtcaccatcacttgccgggcaagtcagagcattagcagctatttaaattggtatcagcagaaaccagggaaagcccctaagctcctgatctatgctgcatccagtttgcaaagtggggtcccatcaaggttcagtggcagtggatctgggacagatttcactctcaccatcagcagtctgcaacctgaagattttgcaacttactactgtcagcaaagctacatcgccccttacacttttggcggagggaccaaggttgagatcaaaggtggaggcggttcgggtggagggggatctggtggcggaggtagcggtggcgggggatcaggtggcgggggatcaggtggcgggggatcacccgctgctctgctgcctgcccggggtaccaacatggcccagaagcgtcctgcctgcaccctgaagcctgagtgtgtccagcagctgctggtttgctcccaggaggccaagaagtcagcctactgcccctacagtcactttcctgtgggggctgccctgctcacccaggaggggagaatcttcaaagggtgcaacatagaaaatgcctgctacccgctgggcatctgtgctgaacggaccgctatccagaaggccgtctcagaagggtacaaggatttcagggcaattgctatcgccagtgacatgcaagatgattttatctctccatgtggggcctgcaggcaagtcatgagagagtttggcaccaactggcccgtgtacatgaccaagccggatggtacgtatatt

SEQ ID NO: 789 - DNA, 1242 bp, synthetic construct
  source 1..1242: mol_type = other DNA
gaggtgcagctggtggagtctgggggaggcttggtccagcctggagggtccctgagactctcctgtgcagcctctggattcaccttcagtgaccactacatggactgggtccgccaggctccagggaaggggctggagtgggttggccgtactagaaacaaagctagtagttacaccacagaatacgccgcgtctgtgaaaggcagattcaccatctcaagagatgattcaaagaactcactgtatctgcaaatgaacagcctgaaaaccgaggacacggcggtgtactactgcgccagagagcctaaatactggatcgacttcgacctatgggggagaggtaccttggtcaccgtctcctcaggagggggcggatcaggcggaggtggatcgggagggggtggtagcgacatccagatgacccagtctccatcctccctgtctgcatctgtaggagacagagtcaccatcacttgccgggcaagtcagagcattagcagctatttaaattggtatcagcagaaaccagggaaagcccctaagctcctgatctatgctgcatccagtttgcaaagtggggtcccatcaaggttcagtggcagtggatctgggacagatttcactctcaccatcagcagtctgcaacctgaagattttgcaacttactactgtcagcaaagctacatcgccccttacacttttggcggagggaccaaggttgagatcaaaggtggaggcggttcgggtggagggggatctggtggcggaggtagcggtggcgggggatcaggtggcgggggatcaggtggcgggggatcaggtggcgggggatcacccgctgctctgctgcctgcccggggtaccaacatggcccagaagcgtcctgcctgcaccctgaagcctgagtgtgtccagcagctgctggtttgctcccaggaggccaagaagtcagcctactgcccctacagtcactttcctgtgggggctgccctgctcacccaggaggggagaatcttcaaagggtgcaacatagaaaatgcctgctacccgctgggcatctgtgctgaacggaccgctatccagaaggccgtctcagaagggtacaaggatttcagggcaattgctatcgccagtgacatgcaagatgattttatctctccatgtggggcctgcaggcaagtcatgagagagtttggcaccaactggcccgtgtacatgaccaagccggatggtacgtatatt

SEQ ID NO: 790 - DNA, 1257 bp, synthetic construct
  source 1..1257: mol_type = other DNA
gaggtgcagctggtggagtctgggggaggcttggtccagcctggagggtccctgagactctcctgtgcagcctctggattcaccttcagtgaccactacatggactgggtccgccaggctccagggaaggggctggagtgggttggccgtactagaaacaaagctagtagttacaccacagaatacgccgcgtctgtgaaaggcagattcaccatctcaagagatgattcaaagaactcactgtatctgcaaatgaacagcctgaaaaccgaggacacggcggtgtactactgcgccagagagcctaaatactggatcgacttcgacctatgggggagaggtaccttggtcaccgtctcctcaggagggggcggatcaggcggaggtggatcgggagggggtggtagcgacatccagatgacccagtctccatcctccctgtctgcatctgtaggagacagagtcaccatcacttgccgggcaagtcagagcattagcagctatttaaattggtatcagcagaaaccagggaaagcccctaagctcctgatctatgctgcatccagtttgcaaagtggggtcccatcaaggttcagtggcagtggatctgggacagatttcactctcaccatcagcagtctgcaacctgaagattttgcaacttactactgtcagcaaagctacatcgccccttacacttttggcggagggaccaaggttgagatcaaaggtggaggcggttcgggtggagggggatctggtggcggaggtagcggtggcgggggatcaggtggcgggggatcaggtggcgggggatcaggtggcgggggatcaggtggcgggggatcacccgctgctctgctgcctgcccggggtaccaacatggcccagaagcgtcctgcctgcaccctgaagcctgagtgtgtccagcagctgctggtttgctcccaggaggccaagaagtcagcctactgcccctacagtcactttcctgtgggggctgccctgctcacccaggaggggagaatcttcaaagggtgcaacatagaaaatgcctgctacccgctgggcatctgtgctgaacggaccgctatccagaaggccgtctcagaagggtacaaggatttcagggcaattgctatcgccagtgacatgcaagatgattttatctctccatgtggggcctgcaggcaagtcatgagagagtttggcaccaactggcccgtgtacatgaccaagccggatggtacgtatatt

SEQ ID NO: 791 - DNA, 1272 bp, synthetic construct
  source 1..1272: mol_type = other DNA
gaggtgcagctggtggagtctgggggaggcttggtccagcctggagggtccctgagactctcctgtgcagcctctggattcaccttcagtgaccactacatggactgggtccgccaggctccagggaaggggctggagtgggttggccgtactagaaacaaagctagtagttacaccacagaatacgccgcgtctgtgaaaggcagattcaccatctcaagagatgattcaaagaactcactgtatctgcaaatgaacagcctgaaaaccgaggacacggcggtgtactactgcgccagagagcctaaatactggatcgacttcgacctatgggggagaggtaccttggtcaccgtctcctcaggagggggcggatcaggcggaggtggatcgggagggggtggtagcgacatccagatgacccagtctccatcctccctgtctgcatctgtaggagacagagtcaccatcacttgccgggcaagtcagagcattagcagctatttaaattggtatcagcagaaaccagggaaagcccctaagctcctgatctatgctgcatccagtttgcaaagtggggtcccatcaaggttcagtggcagtggatctgggacagatttcactctcaccatcagcagtctgcaacctgaagattttgcaacttactactgtcagcaaagctacatcgccccttacacttttggcggagggaccaaggttgagatcaaaggtggaggcggttcgggtggagggggatctggtggcggaggtagcggtggcgggggatcaggtggcgggggatcaggtggcgggggatcaggtggcgggggatcaggtggcgggggatcaggtggcgggggatcacccgctgctctgctgcctgcccggggtaccaacatggcccagaagcgtcctgcctgcaccctgaagcctgagtgtgtccagcagctgctggtttgctcccaggaggccaagaagtcagcctactgcccctacagtcactttcctgtgggggctgccctgctcacccaggaggggagaatcttcaaagggtgcaacatagaaaatgcctgctacccgctgggcatctgtgctgaacggaccgctatccagaaggccgtctcagaagggtacaaggatttcagggcaattgctatcgccagtgacatgcaagatgattttatctctccatgtggggcctgcaggcaagtcatgagagagtttggcaccaactggcccgtgtacatgaccaagccggatggtacgtatatt

SEQ ID NO: 792 - DNA, 1287 bp, synthetic construct
  source 1..1287: mol_type = other DNA
gaggtgcagctggtggagtctgggggaggcttggtccagcctggagggtccctgagactctcctgtgcagcctctggattcaccttcagtgaccactacatggactgggtccgccaggctccagggaaggggctggagtgggttggccgtactagaaacaaagctagtagttacaccacagaatacgccgcgtctgtgaaaggcagattcaccatctcaagagatgattcaaagaactcactgtatctgcaaatgaacagcctgaaaaccgaggacacggcggtgtactactgcgccagagagcctaaatactggatcgacttcgacctatgggggagaggtaccttggtcaccgtctcctcaggagggggcggatcaggcggaggtggatcgggagggggtggtagcgacatccagatgacccagtctccatcctccctgtctgcatctgtaggagacagagtcaccatcacttgccgggcaagtcagagcattagcagctatttaaattggtatcagcagaaaccagggaaagcccctaagctcctgatctatgctgcatccagtttgcaaagtggggtcccatcaaggttcagtggcagtggatctgggacagatttcactctcaccatcagcagtctgcaacctgaagattttgcaacttactactgtcagcaaagctacatcgccccttacacttttggcggagggaccaaggttgagatcaaaggtggaggcggttcgggtggagggggatctggtggcggaggtagcggtggcgggggatcaggtggcgggggatcaggtggcgggggatcaggtggcgggggatcaggtggcgggggatcaggtggcgggggatcaggtggcgggggatcacccgctgctctgctgcctgcccggggtaccaacatggcccagaagcgtcctgcctgcaccctgaagcctgagtgtgtccagcagctgctggtttgctcccaggaggccaagaagtcagcctactgcccctacagtcactttcctgtgggggctgccctgctcacccaggaggggagaatcttcaaagggtgcaacatagaaaatgcctgctacccgctgggcatctgtgctgaacggaccgctatccagaaggccgtctcagaagggtacaaggatttcagggcaattgctatcgccagtgacatgcaagatgattttatctctccatgtggggcctgcaggcaagtcatgagagagtttggcaccaactggcccgtgtacatgaccaagccggatggtacgtatatt

SEQ ID NO: 793 - DNA, 1302 bp, synthetic construct
  source 1..1302: mol_type = other DNA
gaggtgcagctggtggagtctgggggaggcttggtccagcctggagggtccctgagactctcctgtgcagcctctggattcaccttcagtgaccactacatggactgggtccgccaggctccagggaaggggctggagtgggttggccgtactagaaacaaagctagtagttacaccacagaatacgccgcgtctgtgaaaggcagattcaccatctcaagagatgattcaaagaactcactgtatctgcaaatgaacagcctgaaaaccgaggacacggcggtgtactactgcgccagagagcctaaatactggatcgacttcgacctatgggggagaggtaccttggtcaccgtctcctcaggagggggcggatcaggcggaggtggatcgggagggggtggtagcgacatccagatgacccagtctccatcctccctgtctgcatctgtaggagacagagtcaccatcacttgccgggcaagtcagagcattagcagctatttaaattggtatcagcagaaaccagggaaagcccctaagctcctgatctatgctgcatccagtttgcaaagtggggtcccatcaaggttcagtggcagtggatctgggacagatttcactctcaccatcagcagtctgcaacctgaagattttgcaacttactactgtcagcaaagctacatcgccccttacacttttggcggagggaccaaggttgagatcaaaggtggaggcggttcgggtggagggggatctggtggcggaggtagcggtggcgggggatcaggtggcgggggatcaggtggcgggggatcaggtggcgggggatcaggtggcgggggatcaggtggcgggggatcaggtggcgggggatcaggtggcgggggatcacccgctgctctgctgcctgcccggggtaccaacatggcccagaagcgtcctgcctgcaccctgaagcctgagtgtgtccagcagctgctggtttgctcccaggaggccaagaagtcagcctactgcccctacagtcactttcctgtgggggctgccctgctcacccaggaggggagaatcttcaaagggtgcaacatagaaaatgcctgctacccgctgggcatctgtgctgaacggaccgctatccagaaggccgtctcagaagggtacaaggatttcagggcaattgctatcgccagtgacatgcaagatgattttatctctccatgtggggcctgcaggcaagtcatgagagagtttggcaccaactggcccgtgtacatgaccaagccggatggtacgtatatt

SEQ ID NO: 794 - DNA, 1317 bp, synthetic construct
  source 1..1317: mol_type = other DNA
gaggtgcagctggtggagtctgggggaggcttggtccagcctggagggtccctgagactctcctgtgcagcctctggattcaccttcagtgaccactacatggactgggtccgccaggctccagggaaggggctggagtgggttggccgtactagaaacaaagctagtagttacaccacagaatacgccgcgtctgtgaaaggcagattcaccatctcaagagatgattcaaagaactcactgtatctgcaaatgaacagcctgaaaaccgaggacacggcggtgtactactgcgccagagagcctaaatactggatcgacttcgacctatgggggagaggtaccttggtcaccgtctcctcaggagggggcggatcaggcggaggtggatcgggagggggtggtagcgacatccagatgacccagtctccatcctccctgtctgcatctgtaggagacagagtcaccatcacttgccgggcaagtcagagcattagcagctatttaaattggtatcagcagaaaccagggaaagcccctaagctcctgatctatgctgcatccagtttgcaaagtggggtcccatcaaggttcagtggcagtggatctgggacagatttcactctcaccatcagcagtctgcaacctgaagattttgcaacttactactgtcagcaaagctacatcgccccttacacttttggcggagggaccaaggttgagatcaaaggtggaggcggttcgggtggagggggatctggtggcggaggtagcggtggcgggggatcaggtggcgggggatcaggtggcgggggatcaggtggcgggggatcaggtggcgggggatcaggtggcgggggatcaggtggcgggggatcaggtggcgggggatcaggtggcgggggatcacccgctgctctgctgcctgcccggggtaccaacatggcccagaagcgtcctgcctgcaccctgaagcctgagtgtgtccagcagctgctggtttgctcccaggaggccaagaagtcagcctactgcccctacagtcactttcctgtgggggctgccctgctcacccaggaggggagaatcttcaaagggtgcaacatagaaaatgcctgctacccgctgggcatctgtgctgaacggaccgctatccagaaggccgtctcagaagggtacaaggatttcagggcaattgctatcgccagtgacatgcaagatgattttatctctccatgtggggcctgcaggcaagtcatgagagagtttggcaccaactggcccgtgtacatgaccaagccggatggtacgtatatt

SEQ ID NO: 795 - DNA, 1125 bp, synthetic construct
  source 1..1125: mol_type = other DNA
gaggtgcagctggtggagtctgggggaggcttggtacagccagggcggtccctgagactctcctgtacagcttctggattcaccttcagtgaccacgacatgaactgggtccgccaggctccagggaaggggctggagtgggttggccgtactagaaacgccgctggaagttacaccacagaatacgccgcgtctgtgaaaggcagattcaccatctcaagagatgattcaaagaactcactgtatctgcaaatgaacagcctgaaaaccgaggacacggcggtgtactactgcgccagagagcctaaatactggatcgacttcgacctatgggggggagggggcggatcaggcggaggtggatcgggagggggtggtagcgacatccagatgacccagtctccatcctccctgtctgcatctgtaggagacagagtcaccatcacttgccgggcaagtcagagcattagcagctatttaaattggtatcagcagaaaccagggaaagcccctaagctcctgatctatgctgcatccagtttgcaaagtggggtcccatcaaggttcagtggcagtggatctgggacagatttcactctcaccatcagcagtctgcaacctgaagattttgcaacttactactgtcagcaaagctacatcgccccttacacttttggcggagggaccaaggttgagatcaaaggtggcgggggatcacccgctgctctgctgcctgcccggggtaccaacatggcccagaagcgtcctgcctgcaccctgaagcctgagtgtgtccagcagctgctggtttgctcccaggaggccaagaagtcagcctactgcccctacagtcactttcctgtgggggctgccctgctcacccaggaggggagaatcttcaaagggtgcaacatagaaaatgcctgctacccgctgggcatctgtgctgaacggaccgctatccagaaggccgtctcagaagggtacaaggatttcagggcaattgctatcgccagtgacatgcaagatgattttatctctccatgtggggcctgcaggcaagtcatgagagagtttggcaccaactggcccgtgtacatgaccaagccggatggtacgtatatt

SEQ ID NO: 796 - DNA, 1155 bp, synthetic construct
  source 1..1155: mol_type = other DNA
gaggtgcagctggtggagtctgggggaggcttggtacagccagggcggtccctgagactctcctgtacagcttctggattcaccttcagtgaccacgacatgaactgggtccgccaggctccagggaaggggctggagtgggttggccgtactagaaacgccgctggaagttacaccacagaatacgccgcgtctgtgaaaggcagattcaccatctcaagagatgattcaaagaactcactgtatctgcaaatgaacagcctgaaaaccgaggacacggcggtgtactactgcgccagagagcctaaatactggatcgacttcgacctatgggggggagggggcggatcaggcggaggtggatcgggagggggtggtagcgacatccagatgacccagtctccatcctccctgtctgcatctgtaggagacagagtcaccatcacttgccgggcaagtcagagcattagcagctatttaaattggtatcagcagaaaccagggaaagcccctaagctcctgatctatgctgcatccagtttgcaaagtggggtcccatcaaggttcagtggcagtggatctgggacagatttcactctcaccatcagcagtctgcaacctgaagattttgcaacttactactgtcagcaaagctacatcgccccttacacttttggcggagggaccaaggttgagatcaaaggagggggcggatcaggcggaggtggatcgggagggggtggtagccccgctgctctgctgcctgcccggggtaccaacatggcccagaagcgtcctgcctgcaccctgaagcctgagtgtgtccagcagctgctggtttgctcccaggaggccaagaagtcagcctactgcccctacagtcactttcctgtgggggctgccctgctcacccaggaggggagaatcttcaaagggtgcaacatagaaaatgcctgctacccgctgggcatctgtgctgaacggaccgctatccagaaggccgtctcagaagggtacaaggatttcagggcaattgctatcgccagtgacatgcaagatgattttatctctccatgtggggcctgcaggcaagtcatgagagagtttggcaccaactggcccgtgtacatgaccaagccggatggtacgtatatt

SEQ ID NO: 797 - DNA, 1170 bp, synthetic construct
  source 1..1170: mol_type = other DNA
gaggtgcagctggtggagtctgggggaggcttggtacagccagggcggtccctgagactctcctgtacagcttctggattcaccttcagtgaccacgacatgaactgggtccgccaggctccagggaaggggctggagtgggttggccgtactagaaacgccgctggaagttacaccacagaatacgccgcgtctgtgaaaggcagattcaccatctcaagagatgattcaaagaactcactgtatctgcaaatgaacagcctgaaaaccgaggacacggcggtgtactactgcgccagagagcctaaatactggatcgacttcgacctatgggggggagggggcggatcaggcggaggtggatcgggagggggtggtagcgacatccagatgacccagtctccatcctccctgtctgcatctgtaggagacagagtcaccatcacttgccgggcaagtcagagcattagcagctatttaaattggtatcagcagaaaccagggaaagcccctaagctcctgatctatgctgcatccagtttgcaaagtggggtcccatcaaggttcagtggcagtggatctgggacagatttcactctcaccatcagcagtctgcaacctgaagattttgcaacttactactgtcagcaaagctacatcgccccttacacttttggcggagggaccaaggttgagatcaaaggtggaggcggttcgggtggagggggatctggtggcggaggtagcggtggcgggggatcacccgctgctctgctgcctgcccggggtaccaacatggcccagaagcgtcctgcctgcaccctgaagcctgagtgtgtccagcagctgctggtttgctcccaggaggccaagaagtcagcctactgcccctacagtcactttcctgtgggggctgccctgctcacccaggaggggagaatcttcaaagggtgcaacatagaaaatgcctgctacccgctgggcatctgtgctgaacggaccgctatccagaaggccgtctcagaagggtacaaggatttcagggcaattgctatcgccagtgacatgcaagatgattttatctctccatgtggggcctgcaggcaagtcatgagagagtttggcaccaactggcccgtgtacatgaccaagccggatggtacgtatatt

SEQ ID NO: 798 - DNA, 1185 bp, synthetic construct
  source 1..1185: mol_type = other DNA
gaggtgcagctggtggagtctgggggaggcttggtacagccagggcggtccctgagactctcctgtacagcttctggattcaccttcagtgaccacgacatgaactgggtccgccaggctccagggaaggggctggagtgggttggccgtactagaaacgccgctggaagttacaccacagaatacgccgcgtctgtgaaaggcagattcaccatctcaagagatgattcaaagaactcactgtatctgcaaatgaacagcctgaaaaccgaggacacggcggtgtactactgcgccagagagcctaaatactggatcgacttcgacctatgggggggagggggcggatcaggcggaggtggatcgggagggggtggtagcgacatccagatgacccagtctccatcctccctgtctgcatctgtaggagacagagtcaccatcacttgccgggcaagtcagagcattagcagctatttaaattggtatcagcagaaaccagggaaagcccctaagctcctgatctatgctgcatccagtttgcaaagtggggtcccatcaaggttcagtggcagtggatctgggacagatttcactctcaccatcagcagtctgcaacctgaagattttgcaacttactactgtcagcaaagctacatcgccccttacacttttggcggagggaccaaggttgagatcaaaggtggaggcggttcgggtggagggggatctggtggcggaggtagcggtggcgggggatcaggtggcgggggatcacccgctgctctgctgcctgcccggggtaccaacatggcccagaagcgtcctgcctgcaccctgaagcctgagtgtgtccagcagctgctggtttgctcccaggaggccaagaagtcagcctactgcccctacagtcactttcctgtgggggctgccctgctcacccaggaggggagaatcttcaaagggtgcaacatagaaaatgcctgctacccgctgggcatctgtgctgaacggaccgctatccagaaggccgtctcagaagggtacaaggatttcagggcaattgctatcgccagtgacatgcaagatgattttatctctccatgtggggcctgcaggcaagtcatgagagagtttggcaccaactggcccgtgtacatgaccaagccggatggtacgtatatt

SEQ ID NO: 799 - DNA, 1200 bp, synthetic construct
  source 1..1200: mol_type = other DNA
gaggtgcagctggtggagtctgggggaggcttggtacagccagggcggtccctgagactctcctgtacagcttctggattcaccttcagtgaccacgacatgaactgggtccgccaggctccagggaaggggctggagtgggttggccgtactagaaacgccgctggaagttacaccacagaatacgccgcgtctgtgaaaggcagattcaccatctcaagagatgattcaaagaactcactgtatctgcaaatgaacagcctgaaaaccgaggacacggcggtgtactactgcgccagagagcctaaatactggatcgacttcgacctatgggggggagggggcggatcaggcggaggtggatcgggagggggtggtagcgacatccagatgacccagtctccatcctccctgtctgcatctgtaggagacagagtcaccatcacttgccgggcaagtcagagcattagcagctatttaaattggtatcagcagaaaccagggaaagcccctaagctcctgatctatgctgcatccagtttgcaaagtggggtcccatcaaggttcagtggcagtggatctgggacagatttcactctcaccatcagcagtctgcaacctgaagattttgcaacttactactgtcagcaaagctacatcgccccttacacttttggcggagggaccaaggttgagatcaaaggtggaggcggttcgggtggagggggatctggtggcggaggtagcggtggcgggggatcaggtggcgggggatcaggtggcgggggatcacccgctgctctgctgcctgcccggggtaccaacatggcccagaagcgtcctgcctgcaccctgaagcctgagtgtgtccagcagctgctggtttgctcccaggaggccaagaagtcagcctactgcccctacagtcactttcctgtgggggctgccctgctcacccaggaggggagaatcttcaaagggtgcaacatagaaaatgcctgctacccgctgggcatctgtgctgaacggaccgctatccagaaggccgtctcagaagggtacaaggatttcagggcaattgctatcgccagtgacatgcaagatgattttatctctccatgtggggcctgcaggcaagtcatgagagagtttggcaccaactggcccgtgtacatgaccaagccggatggtacgtatatt

SEQ ID NO: 800 - DNA, 1215 bp, synthetic construct
  source 1..1215: mol_type = other DNA
gaggtgcagctggtggagtctgggggaggcttggtacagccagggcggtccctgagactctcctgtacagcttctggattcaccttcagtgaccacgacatgaactgggtccgccaggctccagggaaggggctggagtgggttggccgtactagaaacgccgctggaagttacaccacagaatacgccgcgtctgtgaaaggcagattcaccatctcaagagatgattcaaagaactcactgtatctgcaaatgaacagcctgaaaaccgaggacacggcggtgtactactgcgccagagagcctaaatactggatcgacttcgacctatgggggggagggggcggatcaggcggaggtggatcgggagggggtggtagcgacatccagatgacccagtctccatcctccctgtctgcatctgtaggagacagagtcaccatcacttgccgggcaagtcagagcattagcagctatttaaattggtatcagcagaaaccagggaaagcccctaagctcctgatctatgctgcatccagtttgcaaagtggggtcccatcaaggttcagtggcagtggatctgggacagatttcactctcaccatcagcagtctgcaacctgaagattttgcaacttactactgtcagcaaagctacatcgccccttacacttttggcggagggaccaaggttgagatcaaaggtggaggcggttcgggtggagggggatctggtggcggaggtagcggtggcgggggatcaggtggcgggggatcaggtggcgggggatcaggtggcgggggatcacccgctgctctgctgcctgcccggggtaccaacatggcccagaagcgtcctgcctgcaccctgaagcctgagtgtgtccagcagctgctggtttgctcccaggaggccaagaagtcagcctactgcccctacagtcactttcctgtgggggctgccctgctcacccaggaggggagaatcttcaaagggtgcaacatagaaaatgcctgctacccgctgggcatctgtgctgaacggaccgctatccagaaggccgtctcagaagggtacaaggatttcagggcaattgctatcgccagtgacatgcaagatgattttatctctccatgtggggcctgcaggcaagtcatgagagagtttggcaccaactggcccgtgtacatgaccaagccggatggtacgtatatt

SEQ ID NO: 801 - DNA, 1230 bp, synthetic construct
  source 1..1230: mol_type = other DNA
gaggtgcagctggtggagtctgggggaggcttggtacagccagggcggtccctgagactctcctgtacagcttctggattcaccttcagtgaccacgacatgaactgggtccgccaggctccagggaaggggctggagtgggttggccgtactagaaacgccgctggaagttacaccacagaatacgccgcgtctgtgaaaggcagattcaccatctcaagagatgattcaaagaactcactgtatctgcaaatgaacagcctgaaaaccgaggacacggcggtgtactactgcgccagagagcctaaatactggatcgacttcgacctatgggggggagggggcggatcaggcggaggtggatcgggagggggtggtagcgacatccagatgacccagtctccatcctccctgtctgcatctgtaggagacagagtcaccatcacttgccgggcaagtcagagcattagcagctatttaaattggtatcagcagaaaccagggaaagcccctaagctcctgatctatgctgcatccagtttgcaaagtggggtcccatcaaggttcagtggcagtggatctgggacagatttcactctcaccatcagcagtctgcaacctgaagattttgcaacttactactgtcagcaaagctacatcgccccttacacttttggcggagggaccaaggttgagatcaaaggtggaggcggttcgggtggagggggatctggtggcggaggtagcggtggcgggggatcaggtggcgggggatcaggtggcgggggatcaggtggcgggggatcaggtggcgggggatcacccgctgctctgctgcctgcccggggtaccaacatggcccagaagcgtcctgcctgcaccctgaagcctgagtgtgtccagcagctgctggtttgctcccaggaggccaagaagtcagcctactgcccctacagtcactttcctgtgggggctgccctgctcacccaggaggggagaatcttcaaagggtgcaacatagaaaatgcctgctacccgctgggcatctgtgctgaacggaccgctatccagaaggccgtctcagaagggtacaaggatttcagggcaattgctatcgccagtgacatgcaagatgattttatctctccatgtggggcctgcaggcaagtcatgagagagtttggcaccaactggcccgtgtacatgaccaagccggatggtacgtatatt

SEQ ID NO: 802 - DNA, 1245 bp, synthetic construct
  source 1..1245: mol_type = other DNA
gaggtgcagctggtggagtctgggggaggcttggtacagccagggcggtccctgagactctcctgtacagcttctggattcaccttcagtgaccacgacatgaactgggtccgccaggctccagggaaggggctggagtgggttggccgtactagaaacgccgctggaagttacaccacagaatacgccgcgtctgtgaaaggcagattcaccatctcaagagatgattcaaagaactcactgtatctgcaaatgaacagcctgaaaaccgaggacacggcggtgtactactgcgccagagagcctaaatactggatcgacttcgacctatgggggggagggggcggatcaggcggaggtggatcgggagggggtggtagcgacatccagatgacccagtctccatcctccctgtctgcatctgtaggagacagagtcaccatcacttgccgggcaagtcagagcattagcagctatttaaattggtatcagcagaaaccagggaaagcccctaagctcctgatctatgctgcatccagtttgcaaagtggggtcccatcaaggttcagtggcagtggatctgggacagatttcactctcaccatcagcagtctgcaacctgaagattttgcaacttactactgtcagcaaagctacatcgccccttacacttttggcggagggaccaaggttgagatcaaaggtggaggcggttcgggtggagggggatctggtggcggaggtagcggtggcgggggatcaggtggcgggggatcaggtggcgggggatcaggtggcgggggatcaggtggcgggggatcaggtggcgggggatcacccgctgctctgctgcctgcccggggtaccaacatggcccagaagcgtcctgcctgcaccctgaagcctgagtgtgtccagcagctgctggtttgctcccaggaggccaagaagtcagcctactgcccctacagtcactttcctgtgggggctgccctgctcacccaggaggggagaatcttcaaagggtgcaacatagaaaatgcctgctacccgctgggcatctgtgctgaacggaccgctatccagaaggccgtctcagaagggtacaaggatttcagggcaattgctatcgccagtgacatgcaagatgattttatctctccatgtggggcctgcaggcaagtcatgagagagtttggcaccaactggcccgtgtacatgaccaagccggatggtacgtatatt

SEQ ID NO: 803 - DNA, 1260 bp, synthetic construct
  source 1..1260: mol_type = other DNA
gaggtgcagctggtggagtctgggggaggcttggtacagccagggcggtccctgagactctcctgtacagcttctggattcaccttcagtgaccacgacatgaactgggtccgccaggctccagggaaggggctggagtgggttggccgtactagaaacgccgctggaagttacaccacagaatacgccgcgtctgtgaaaggcagattcaccatctcaagagatgattcaaagaactcactgtatctgcaaatgaacagcctgaaaaccgaggacacggcggtgtactactgcgccagagagcctaaatactggatcgacttcgacctatgggggggagggggcggatcaggcggaggtggatcgggagggggtggtagcgacatccagatgacccagtctccatcctccctgtctgcatctgtaggagacagagtcaccatcacttgccgggcaagtcagagcattagcagctatttaaattggtatcagcagaaaccagggaaagcccctaagctcctgatctatgctgcatccagtttgcaaagtggggtcccatcaaggttcagtggcagtggatctgggacagatttcactctcaccatcagcagtctgcaacctgaagattttgcaacttactactgtcagcaaagctacatcgccccttacacttttggcggagggaccaaggttgagatcaaaggtggaggcggttcgggtggagggggatctggtggcggaggtagcggtggcgggggatcaggtggcgggggatcaggtggcgggggatcaggtggcgggggatcaggtggcgggggatcaggtggcgggggatcaggtggcgggggatcacccgctgctctgctgcctgcccggggtaccaacatggcccagaagcgtcctgcctgcaccctgaagcctgagtgtgtccagcagctgctggtttgctcccaggaggccaagaagtcagcctactgcccctacagtcactttcctgtgggggctgccctgctcacccaggaggggagaatcttcaaagggtgcaacatagaaaatgcctgctacccgctgggcatctgtgctgaacggaccgctatccagaaggccgtctcagaagggtacaaggatttcagggcaattgctatcgccagtgacatgcaagatgattttatctctccatgtggggcctgcaggcaagtcatgagagagtttggcaccaactggcccgtgtacatgaccaagccggatggtacgtatatt

SEQ ID NO: 804 - DNA, 1275 bp, synthetic construct
  source 1..1275: mol_type = other DNA
gaggtgcagctggtggagtctgggggaggcttggtacagccagggcggtccctgagactctcctgtacagcttctggattcaccttcagtgaccacgacatgaactgggtccgccaggctccagggaaggggctggagtgggttggccgtactagaaacgccgctggaagttacaccacagaatacgccgcgtctgtgaaaggcagattcaccatctcaagagatgattcaaagaactcactgtatctgcaaatgaacagcctgaaaaccgaggacacggcggtgtactactgcgccagagagcctaaatactggatcgacttcgacctatgggggggagggggcggatcaggcggaggtggatcgggagggggtggtagcgacatccagatgacccagtctccatcctccctgtctgcatctgtaggagacagagtcaccatcacttgccgggcaagtcagagcattagcagctatttaaattggtatcagcagaaaccagggaaagcccctaagctcctgatctatgctgcatccagtttgcaaagtggggtcccatcaaggttcagtggcagtggatctgggacagatttcactctcaccatcagcagtctgcaacctgaagattttgcaacttactactgtcagcaaagctacatcgccccttacacttttggcggagggaccaaggttgagatcaaaggtggaggcggttcgggtggagggggatctggtggcggaggtagcggtggcgggggatcaggtggcgggggatcaggtggcgggggatcaggtggcgggggatcaggtggcgggggatcaggtggcgggggatcaggtggcgggggatcaggtggcgggggatcacccgctgctctgctgcctgcccggggtaccaacatggcccagaagcgtcctgcctgcaccctgaagcctgagtgtgtccagcagctgctggtttgctcccaggaggccaagaagtcagcctactgcccctacagtcactttcctgtgggggctgccctgctcacccaggaggggagaatcttcaaagggtgcaacatagaaaatgcctgctacccgctgggcatctgtgctgaacggaccgctatccagaaggccgtctcagaagggtacaaggatttcagggcaattgctatcgccagtgacatgcaagatgattttatctctccatgtggggcctgcaggcaagtcatgagagagtttggcaccaactggcccgtgtacatgaccaagccggatggtacgtatatt

SEQ ID NO: 805 - DNA, 1290 bp, synthetic construct
  source 1..1290: mol_type = other DNA
gaggtgcagctggtggagtctgggggaggcttggtacagccagggcggtccctgagactctcctgtacagcttctggattcaccttcagtgaccacgacatgaactgggtccgccaggctccagggaaggggctggagtgggttggccgtactagaaacgccgctggaagttacaccacagaatacgccgcgtctgtgaaaggcagattcaccatctcaagagatgattcaaagaactcactgtatctgcaaatgaacagcctgaaaaccgaggacacggcggtgtactactgcgccagagagcctaaatactggatcgacttcgacctatgggggggagggggcggatcaggcggaggtggatcgggagggggtggtagcgacatccagatgacccagtctccatcctccctgtctgcatctgtaggagacagagtcaccatcacttgccgggcaagtcagagcattagcagctatttaaattggtatcagcagaaaccagggaaagcccctaagctcctgatctatgctgcatccagtttgcaaagtggggtcccatcaaggttcagtggcagtggatctgggacagatttcactctcaccatcagcagtctgcaacctgaagattttgcaacttactactgtcagcaaagctacatcgccccttacacttttggcggagggaccaaggttgagatcaaaggtggaggcggttcgggtggagggggatctggtggcggaggtagcggtggcgggggatcaggtggcgggggatcaggtggcgggggatcaggtggcgggggatcaggtggcgggggatcaggtggcgggggatcaggtggcgggggatcaggtggcgggggatcaggtggcgggggatcacccgctgctctgctgcctgcccggggtaccaacatggcccagaagcgtcctgcctgcaccctgaagcctgagtgtgtccagcagctgctggtttgctcccaggaggccaagaagtcagcctactgcccctacagtcactttcctgtgggggctgccctgctcacccaggaggggagaatcttcaaagggtgcaacatagaaaatgcctgctacccgctgggcatctgtgctgaacggaccgctatccagaaggccgtctcagaagggtacaaggatttcagggcaattgctatcgccagtgacatgcaagatgattttatctctccatgtggggcctgcaggcaagtcatgagagagtttggcaccaactggcccgtgtacatgaccaagccggatggtacgtatatt

SEQ ID NO: 806 - DNA, 1152 bp, synthetic construct
  source 1..1152: mol_type = other DNA
gacatccagatgacccagtctccatcctccctgtctgcatctgtaggagacagagtcaccatcacttgccgggcaagtcagagcattagcagctatttaaattggtatcagcagaaaccagggaaagcccctaagctcctgatctatgctgcatccagtttgcaaagtggggtcccatcaaggttcagtggcagtggatgcggtacagatttcactctcaccatcagcagtctgcaacctgaagattttgcaacttactactgtcagcaaagctacatcgccccttacacttttggcggagggaccaaggttgagatcaaaggagggggcggatcaggcggaggtggatcgggagggggtggtagcgaggtgcagctggtggagtctgggggaggcttggtccagcctggagggtccctgagactctcctgtgcagcctctggattcaccttcgtagaccacgacatggactgggtccgccaggctccagggaaggggctggagtgggttggccgtactagaaacaaactaggaagttacaccacagaatacgccgcgtctgtgaaaggcagattcaccatctcaagagatgattcaaagaactcactgtatctgcaaatgaacagcctgaaaaccgaggacacggcggtgtactactgcgccagagagcctaaatactggatcgacttcgacctatgggggagaggtaccttggtcaccgtctcctcaggtggcgggggatcacccgctgctctgctgcctgcccggggtaccaacatggcccagaagcgtcctgcctgcaccctgaagcctgagtgtgtccagcagctgctggtttgctcccaggaggccaagaagtcagcctactgcccctacagtcactttcctgtgggggctgccctgctcacccaggaggggagaatcttcaaagggtgcaacatagaaaatgcctgctacccgctgggcatctgtgctgaacggaccgctatccagaaggccgtctcagaagggtacaaggatttcagggcaattgctatcgccagtgacatgcaagatgattttatctctccatgtggggcctgcaggcaagtcatgagagagtttggcaccaactggcccgtgtacatgaccaagccggatggtacgtatatt

SEQ ID NO: 807 - DNA, 1182 bp, synthetic construct
  source 1..1182: mol_type = other DNA
gacatccagatgacccagtctccatcctccctgtctgcatctgtaggagacagagtcaccatcacttgccgggcaagtcagagcattagcagctatttaaattggtatcagcagaaaccagggaaagcccctaagctcctgatctatgctgcatccagtttgcaaagtggggtcccatcaaggttcagtggcagtggatgcggtacagatttcactctcaccatcagcagtctgcaacctgaagattttgcaacttactactgtcagcaaagctacatcgccccttacacttttggcggagggaccaaggttgagatcaaaggagggggcggatcaggcggaggtggatcgggagggggtggtagcgaggtgcagctggtggagtctgggggaggcttggtccagcctggagggtccctgagactctcctgtgcagcctctggattcaccttcgtagaccacgacatggactgggtccgccaggctccagggaaggggctggagtgggttggccgtactagaaacaaactaggaagttacaccacagaatacgccgcgtctgtgaaaggcagattcaccatctcaagagatgattcaaagaactcactgtatctgcaaatgaacagcctgaaaaccgaggacacggcggtgtactactgcgccagagagcctaaatactggatcgacttcgacctatgggggagaggtaccttggtcaccgtctcctcaggagggggcggatcaggcggaggtggatcgggagggggtggtagccccgctgctctgctgcctgcccggggtaccaacatggcccagaagcgtcctgcctgcaccctgaagcctgagtgtgtccagcagctgctggtttgctcccaggaggccaagaagtcagcctactgcccctacagtcactttcctgtgggggctgccctgctcacccaggaggggagaatcttcaaagggtgcaacatagaaaatgcctgctacccgctgggcatctgtgctgaacggaccgctatccagaaggccgtctcagaagggtacaaggatttcagggcaattgctatcgccagtgacatgcaagatgattttatctctccatgtggggcctgcaggcaagtcatgagagagtttggcaccaactggcccgtgtacatgaccaagccggatggtacgtatatt

SEQ ID NO: 808 - DNA, 1197 bp, synthetic construct
  source 1..1197: mol_type = other DNA
gacatccagatgacccagtctccatcctccctgtctgcatctgtaggagacagagtcaccatcacttgccgggcaagtcagagcattagcagctatttaaattggtatcagcagaaaccagggaaagcccctaagctcctgatctatgctgcatccagtttgcaaagtggggtcccatcaaggttcagtggcagtggatgcggtacagatttcactctcaccatcagcagtctgcaacctgaagattttgcaacttactactgtcagcaaagctacatcgccccttacacttttggcggagggaccaaggttgagatcaaaggagggggcggatcaggcggaggtggatcgggagggggtggtagcgaggtgcagctggtggagtctgggggaggcttggtccagcctggagggtccctgagactctcctgtgcagcctctggattcaccttcgtagaccacgacatggactgggtccgccaggctccagggaaggggctggagtgggttggccgtactagaaacaaactaggaagttacaccacagaatacgccgcgtctgtgaaaggcagattcaccatctcaagagatgattcaaagaactcactgtatctgcaaatgaacagcctgaaaaccgaggacacggcggtgtactactgcgccagagagcctaaatactggatcgacttcgacctatgggggagaggtaccttggtcaccgtctcctcaggtggaggcggttcgggtggagggggatctggtggcggaggtagcggtggcgggggatcacccgctgctctgctgcctgcccggggtaccaacatggcccagaagcgtcctgcctgcaccctgaagcctgagtgtgtccagcagctgctggtttgctcccaggaggccaagaagtcagcctactgcccctacagtcactttcctgtgggggctgccctgctcacccaggaggggagaatcttcaaagggtgcaacatagaaaatgcctgctacccgctgggcatctgtgctgaacggaccgctatccagaaggccgtctcagaagggtacaaggatttcagggcaattgctatcgccagtgacatgcaagatgattttatctctccatgtggggcctgcaggcaagtcatgagagagtttggcaccaactggcccgtgtacatgaccaagccggatggtacgtatatt

SEQ ID NO: 809 - DNA, 1212 bp, synthetic construct
  source 1..1212: mol_type = other DNA
gacatccagatgacccagtctccatcctccctgtctgcatctgtaggagacagagtcaccatcacttgccgggcaagtcagagcattagcagctatttaaattggtatcagcagaaaccagggaaagcccctaagctcctgatctatgctgcatccagtttgcaaagtggggtcccatcaaggttcagtggcagtggatgcggtacagatttcactctcaccatcagcagtctgcaacctgaagattttgcaacttactactgtcagcaaagctacatcgccccttacacttttggcggagggaccaaggttgagatcaaaggagggggcggatcaggcggaggtggatcgggagggggtggtagcgaggtgcagctggtggagtctgggggaggcttggtccagcctggagggtccctgagactctcctgtgcagcctctggattcaccttcgtagaccacgacatggactgggtccgccaggctccagggaaggggctggagtgggttggccgtactagaaacaaactaggaagttacaccacagaatacgccgcgtctgtgaaaggcagattcaccatctcaagagatgattcaaagaactcactgtatctgcaaatgaacagcctgaaaaccgaggacacggcggtgtactactgcgccagagagcctaaatactggatcgacttcgacctatgggggagaggtaccttggtcaccgtctcctcaggtggaggcggttcgggtggagggggatctggtggcggaggtagcggtggcgggggatcaggtggcgggggatcacccgctgctctgctgcctgcccggggtaccaacatggcccagaagcgtcctgcctgcaccctgaagcctgagtgtgtccagcagctgctggtttgctcccaggaggccaagaagtcagcctactgcccctacagtcactttcctgtgggggctgccctgctcacccaggaggggagaatcttcaaagggtgcaacatagaaaatgcctgctacccgctgggcatctgtgctgaacggaccgctatccagaaggccgtctcagaagggtacaaggatttcagggcaattgctatcgccagtgacatgcaagatgattttatctctccatgtggggcctgcaggcaagtcatgagagagtttggcaccaactggcccgtgtacatgaccaagccggatggtacgtatatt

SEQ ID NO: 810 - DNA, 1227 bp, synthetic construct
  source 1..1227: mol_type = other DNA
gacatccagatgacccagtctccatcctccctgtctgcatctgtaggagacagagtcaccatcacttgccgggcaagtcagagcattagcagctatttaaattggtatcagcagaaaccagggaaagcccctaagctcctgatctatgctgcatccagtttgcaaagtggggtcccatcaaggttcagtggcagtggatgcggtacagatttcactctcaccatcagcagtctgcaacctgaagattttgcaacttactactgtcagcaaagctacatcgccccttacacttttggcggagggaccaaggttgagatcaaaggagggggcggatcaggcggaggtggatcgggagggggtggtagcgaggtgcagctggtggagtctgggggaggcttggtccagcctggagggtccctgagactctcctgtgcagcctctggattcaccttcgtagaccacgacatggactgggtccgccaggctccagggaaggggctggagtgggttggccgtactagaaacaaactaggaagttacaccacagaatacgccgcgtctgtgaaaggcagattcaccatctcaagagatgattcaaagaactcactgtatctgcaaatgaacagcctgaaaaccgaggacacggcggtgtactactgcgccagagagcctaaatactggatcgacttcgacctatgggggagaggtaccttggtcaccgtctcctcaggtggaggcggttcgggtggagggggatctggtggcggaggtagcggtggcgggggatcaggtggcgggggatcaggtggcgggggatcacccgctgctctgctgcctgcccggggtaccaacatggcccagaagcgtcctgcctgcaccctgaagcctgagtgtgtccagcagctgctggtttgctcccaggaggccaagaagtcagcctactgcccctacagtcactttcctgtgggggctgccctgctcacccaggaggggagaatcttcaaagggtgcaacatagaaaatgcctgctacccgctgggcatctgtgctgaacggaccgctatccagaaggccgtctcagaagggtacaaggatttcagggcaattgctatcgccagtgacatgcaagatgattttatctctccatgtggggcctgcaggcaagtcatgagagagtttggcaccaactggcccgtgtacatgaccaagccggatggtacgtatatt

SEQ ID NO: 811 - DNA, 1242 bp, synthetic construct
  source 1..1242: mol_type = other DNA
gacatccagatgacccagtctccatcctccctgtctgcatctgtaggagacagagtcaccatcacttgccgggcaagtcagagcattagcagctatttaaattggtatcagcagaaaccagggaaagcccctaagctcctgatctatgctgcatccagtttgcaaagtggggtcccatcaaggttcagtggcagtggatgcggtacagatttcactctcaccatcagcagtctgcaacctgaagattttgcaacttactactgtcagcaaagctacatcgccccttacacttttggcggagggaccaaggttgagatcaaaggagggggcggatcaggcggaggtggatcgggagggggtggtagcgaggtgcagctggtggagtctgggggaggcttggtccagcctggagggtccctgagactctcctgtgcagcctctggattcaccttcgtagaccacgacatggactgggtccgccaggctccagggaaggggctggagtgggttggccgtactagaaacaaactaggaagttacaccacagaatacgccgcgtctgtgaaaggcagattcaccatctcaagagatgattcaaagaactcactgtatctgcaaatgaacagcctgaaaaccgaggacacggcggtgtactactgcgccagagagcctaaatactggatcgacttcgacctatgggggagaggtaccttggtcaccgtctcctcaggtggaggcggttcgggtggagggggatctggtggcggaggtagcggtggcgggggatcaggtggcgggggatcaggtggcgggggatcaggtggcgggggatcacccgctgctctgctgcctgcccggggtaccaacatggcccagaagcgtcctgcctgcaccctgaagcctgagtgtgtccagcagctgctggtttgctcccaggaggccaagaagtcagcctactgcccctacagtcactttcctgtgggggctgccctgctcacccaggaggggagaatcttcaaagggtgcaacatagaaaatgcctgctacccgctgggcatctgtgctgaacggaccgctatccagaaggccgtctcagaagggtacaaggatttcagggcaattgctatcgccagtgacatgcaagatgattttatctctccatgtggggcctgcaggcaagtcatgagagagtttggcaccaactggcccgtgtacatgaccaagccggatggtacgtatatt

SEQ ID NO: 812 - DNA, 1257 bp, synthetic construct
  source 1..1257: mol_type = other DNA
gacatccagatgacccagtctccatcctccctgtctgcatctgtaggagacagagtcaccatcacttgccgggcaagtcagagcattagcagctatttaaattggtatcagcagaaaccagggaaagcccctaagctcctgatctatgctgcatccagtttgcaaagtggggtcccatcaaggttcagtggcagtggatgcggtacagatttcactctcaccatcagcagtctgcaacctgaagattttgcaacttactactgtcagcaaagctacatcgccccttacacttttggcggagggaccaaggttgagatcaaaggagggggcggatcaggcggaggtggatcgggagggggtggtagcgaggtgcagctggtggagtctgggggaggcttggtccagcctggagggtccctgagactctcctgtgcagcctctggattcaccttcgtagaccacgacatggactgggtccgccaggctccagggaaggggctggagtgggttggccgtactagaaacaaactaggaagttacaccacagaatacgccgcgtctgtgaaaggcagattcaccatctcaagagatgattcaaagaactcactgtatctgcaaatgaacagcctgaaaaccgaggacacggcggtgtactactgcgccagagagcctaaatactggatcgacttcgacctatgggggagaggtaccttggtcaccgtctcctcaggtggaggcggttcgggtggagggggatctggtggcggaggtagcggtggcgggggatcaggtggcgggggatcaggtggcgggggatcaggtggcgggggatcaggtggcgggggatcacccgctgctctgctgcctgcccggggtaccaacatggcccagaagcgtcctgcctgcaccctgaagcctgagtgtgtccagcagctgctggtttgctcccaggaggccaagaagtcagcctactgcccctacagtcactttcctgtgggggctgccctgctcacccaggaggggagaatcttcaaagggtgcaacatagaaaatgcctgctacccgctgggcatctgtgctgaacggaccgctatccagaaggccgtctcagaagggtacaaggatttcagggcaattgctatcgccagtgacatgcaagatgattttatctctccatgtggggcctgcaggcaagtcatgagagagtttggcaccaactggcccgtgtacatgaccaagccggatggtacgtatatt

SEQ ID NO: 813 - DNA, 1272 bp, synthetic construct
  source 1..1272: mol_type = other DNA
gacatccagatgacccagtctccatcctccctgtctgcatctgtaggagacagagtcaccatcacttgccgggcaagtcagagcattagcagctatttaaattggtatcagcagaaaccagggaaagcccctaagctcctgatctatgctgcatccagtttgcaaagtggggtcccatcaaggttcagtggcagtggatgcggtacagatttcactctcaccatcagcagtctgcaacctgaagattttgcaacttactactgtcagcaaagctacatcgccccttacacttttggcggagggaccaaggttgagatcaaaggagggggcggatcaggcggaggtggatcgggagggggtggtagcgaggtgcagctggtggagtctgggggaggcttggtccagcctggagggtccctgagactctcctgtgcagcctctggattcaccttcgtagaccacgacatggactgggtccgccaggctccagggaaggggctggagtgggttggccgtactagaaacaaactaggaagttacaccacagaatacgccgcgtctgtgaaaggcagattcaccatctcaagagatgattcaaagaactcactgtatctgcaaatgaacagcctgaaaaccgaggacacggcggtgtactactgcgccagagagcctaaatactggatcgacttcgacctatgggggagaggtaccttggtcaccgtctcctcaggtggaggcggttcgggtggagggggatctggtggcggaggtagcggtggcgggggatcaggtggcgggggatcaggtggcgggggatcaggtggcgggggatcaggtggcgggggatcaggtggcgggggatcacccgctgctctgctgcctgcccggggtaccaacatggcccagaagcgtcctgcctgcaccctgaagcctgagtgtgtccagcagctgctggtttgctcccaggaggccaagaagtcagcctactgcccctacagtcactttcctgtgggggctgccctgctcacccaggaggggagaatcttcaaagggtgcaacatagaaaatgcctgctacccgctgggcatctgtgctgaacggaccgctatccagaaggccgtctcagaagggtacaaggatttcagggcaattgctatcgccagtgacatgcaagatgattttatctctccatgtggggcctgcaggcaagtcatgagagagtttggcaccaactggcccgtgtacatgaccaagccggatggtacgtatatt

SEQ ID NO: 814 - DNA, 1287 bp, synthetic construct
  source 1..1287: mol_type = other DNA
gacatccagatgacccagtctccatcctccctgtctgcatctgtaggagacagagtcaccatcacttgccgggcaagtcagagcattagcagctatttaaattggtatcagcagaaaccagggaaagcccctaagctcctgatctatgctgcatccagtttgcaaagtggggtcccatcaaggttcagtggcagtggatgcggtacagatttcactctcaccatcagcagtctgcaacctgaagattttgcaacttactactgtcagcaaagctacatcgccccttacacttttggcggagggaccaaggttgagatcaaaggagggggcggatcaggcggaggtggatcgggagggggtggtagcgaggtgcagctggtggagtctgggggaggcttggtccagcctggagggtccctgagactctcctgtgcagcctctggattcaccttcgtagaccacgacatggactgggtccgccaggctccagggaaggggctggagtgggttggccgtactagaaacaaactaggaagttacaccacagaatacgccgcgtctgtgaaaggcagattcaccatctcaagagatgattcaaagaactcactgtatctgcaaatgaacagcctgaaaaccgaggacacggcggtgtactactgcgccagagagcctaaatactggatcgacttcgacctatgggggagaggtaccttggtcaccgtctcctcaggtggaggcggttcgggtggagggggatctggtggcggaggtagcggtggcgggggatcaggtggcgggggatcaggtggcgggggatcaggtggcgggggatcaggtggcgggggatcaggtggcgggggatcaggtggcgggggatcacccgctgctctgctgcctgcccggggtaccaacatggcccagaagcgtcctgcctgcaccctgaagcctgagtgtgtccagcagctgctggtttgctcccaggaggccaagaagtcagcctactgcccctacagtcactttcctgtgggggctgccctgctcacccaggaggggagaatcttcaaagggtgcaacatagaaaatgcctgctacccgctgggcatctgtgctgaacggaccgctatccagaaggccgtctcagaagggtacaaggatttcagggcaattgctatcgccagtgacatgcaagatgattttatctctccatgtggggcctgcaggcaagtcatgagagagtttggcaccaactggcccgtgtacatgaccaagccggatggtacgtatatt

SEQ ID NO: 815 - DNA, 1302 bp, synthetic construct
  source 1..1302: mol_type = other DNA
gacatccagatgacccagtctccatcctccctgtctgcatctgtaggagacagagtcaccatcacttgccgggcaagtcagagcattagcagctatttaaattggtatcagcagaaaccagggaaagcccctaagctcctgatctatgctgcatccagtttgcaaagtggggtcccatcaaggttcagtggcagtggatgcggtacagatttcactctcaccatcagcagtctgcaacctgaagattttgcaacttactactgtcagcaaagctacatcgccccttacacttttggcggagggaccaaggttgagatcaaaggagggggcggatcaggcggaggtggatcgggagggggtggtagcgaggtgcagctggtggagtctgggggaggcttggtccagcctggagggtccctgagactctcctgtgcagcctctggattcaccttcgtagaccacgacatggactgggtccgccaggctccagggaaggggctggagtgggttggccgtactagaaacaaactaggaagttacaccacagaatacgccgcgtctgtgaaaggcagattcaccatctcaagagatgattcaaagaactcactgtatctgcaaatgaacagcctgaaaaccgaggacacggcggtgtactactgcgccagagagcctaaatactggatcgacttcgacctatgggggagaggtaccttggtcaccgtctcctcaggtggaggcggttcgggtggagggggatctggtggcggaggtagcggtggcgggggatcaggtggcgggggatcaggtggcgggggatcaggtggcgggggatcaggtggcgggggatcaggtggcgggggatcaggtggcgggggatcaggtggcgggggatcacccgctgctctgctgcctgcccggggtaccaacatggcccagaagcgtcctgcctgcaccctgaagcctgagtgtgtccagcagctgctggtttgctcccaggaggccaagaagtcagcctactgcccctacagtcactttcctgtgggggctgccctgctcacccaggaggggagaatcttcaaagggtgcaacatagaaaatgcctgctacccgctgggcatctgtgctgaacggaccgctatccagaaggccgtctcagaagggtacaaggatttcagggcaattgctatcgccagtgacatgcaagatgattttatctctccatgtggggcctgcaggcaagtcatgagagagtttggcaccaactggcccgtgtacatgaccaagccggatggtacgtatatt

SEQ ID NO: 816 - DNA, 1317 bp, synthetic construct
  source 1..1317: mol_type = other DNA
gacatccagatgacccagtctccatcctccctgtctgcatctgtaggagacagagtcaccatcacttgccgggcaagtcagagcattagcagctatttaaattggtatcagcagaaaccagggaaagcccctaagctcctgatctatgctgcatccagtttgcaaagtggggtcccatcaaggttcagtggcagtggatgcggtacagatttcactctcaccatcagcagtctgcaacctgaagattttgcaacttactactgtcagcaaagctacatcgccccttacacttttggcggagggaccaaggttgagatcaaaggagggggcggatcaggcggaggtggatcgggagggggtggtagcgaggtgcagctggtggagtctgggggaggcttggtccagcctggagggtccctgagactctcctgtgcagcctctggattcaccttcgtagaccacgacatggactgggtccgccaggctccagggaaggggctggagtgggttggccgtactagaaacaaactaggaagttacaccacagaatacgccgcgtctgtgaaaggcagattcaccatctcaagagatgattcaaagaactcactgtatctgcaaatgaacagcctgaaaaccgaggacacggcggtgtactactgcgccagagagcctaaatactggatcgacttcgacctatgggggagaggtaccttggtcaccgtctcctcaggtggaggcggttcgggtggagggggatctggtggcggaggtagcggtggcgggggatcaggtggcgggggatcaggtggcgggggatcaggtggcgggggatcaggtggcgggggatcaggtggcgggggatcaggtggcgggggatcaggtggcgggggatcaggtggcgggggatcacccgctgctctgctgcctgcccggggtaccaacatggcccagaagcgtcctgcctgcaccctgaagcctgagtgtgtccagcagctgctggtttgctcccaggaggccaagaagtcagcctactgcccctacagtcactttcctgtgggggctgccctgctcacccaggaggggagaatcttcaaagggtgcaacatagaaaatgcctgctacccgctgggcatctgtgctgaacggaccgctatccagaaggccgtctcagaagggtacaaggatttcagggcaattgctatcgccagtgacatgcaagatgattttatctctccatgtggggcctgcaggcaagtcatgagagagtttggcaccaactggcccgtgtacatgaccaagccggatggtacgtatatt

SEQ ID NO: 817 - DNA, 1158 bp, synthetic construct
  source 1..1158: mol_type = other DNA
cccgctgctctgctgcctgcccggggtaccaacatggcccagaagcgtcctgcctgcaccctgaagcctgagtgtgtccagcagctgctggtttgctcccaggaggccaagaagtcagcctactgcccctacagtcactttcctgtgggggctgccctgctcacccaggaggggagaatcttcaaagggtgcaacatagaaaatgcctgctacccgctgggcatctgtgctgaacggaccgctatccagaaggccgtctcagaagggtacaaggatttcagggcaattgctatcgccagtgacatgcaagatgattttatctctccatgtggggcctgcaggcaagtcatgagagagtttggcaccaactggcccgtgtacatgaccaagccggatggtacgtatattggtggcgggggatcagacatccagatgacccagtctccatcttccgtgtctgcatctgtaggagacagagtcaccatcacttgtcgggcgagtcagggtattagcagctggttagcctggtatcagcagaaaccagggaaagcccctaagctcctgatctatgctgcatccagtttgcaaagtggggtcccatcaaggttcagcggcagtggatctgggacagatttcactctcaccatcagcagcctgcagcctgaagattttgcaacttattactgtcagcaaacaaatagtttcccttacacttttggcggagggaccaaggttgagatcaaaggagggggcggatcaggcggaggtggatcgggagggggtggtagcgaggtgcagctgttggagtctgggggaggcttggtacagcctggggggtccctgagactctcctgtgcagcctctggattcacctttagcaattatgccatgagctgggtccgccaggctccagggaaggggctggagtgggtctcagctattagtggtagtggtggtagcacatactacgcagactccgtgaagggccggttcaccatctccagagacaattccaagaacacgctgtatctgcaaatgaacagcctgagagccgaggacacggcggtgtactactgcgccaagggccctcctacataccacacaaactactactacatggacgtatggggcaagggtacaactgtcaccgtctcctca

SEQ ID NO: 818 - DNA, 1158 bp, synthetic construct
  source 1..1158: mol_type = other DNA
cccgctgctctgctgcctgcccggggtaccaacatggcccagaagcgtcctgcctgcaccctgaagcctgagtgtgtccagcagctgctggtttgctcccaggaggccaagaagtcagcctactgcccctacagtcactttcctgtgggggctgccctgctcacccaggaggggagaatcttcaaagggtgcaacatagaaaatgcctgctacccgctgggcatctgtgctgaacggaccgctatccagaaggccgtctcagaagggtacaaggatttcagggcaattgctatcgccagtgacatgcaagatgattttatctctccatgtggggcctgcaggcaagtcatgagagagtttggcaccaactggcccgtgtacatgaccaagccggatggtacgtatattggtggcgggggatcagacatccagatgacccagtctccatcttccgtgtctgcatctgtaggagacagagtcaccatcacttgtcgggcgagtcagggtattagcagctggttagcctggtatcagcagaaaccagggaaagcccctaagctcctgatctatgctgcatccagtttgcaaagtggggtcccatcaaggttcagcggcagtggatctgggacagatttcactctcaccatcagcagcctgcagcctgaagattttgcaacttattactgtcagcaaacaaatagtttcccttacacttttggcggagggaccaaggttgagatcaaaggagggggcggatcaggcggaggtggatcgggagggggtggtagcgaggtgcagctgttggagtctgggggaggcttggtacagcctggggggtccctgagactctcctgtgcagcctctggattcacctttagcagctatgtcatgatctgggtccgccaggctccagggaaggggctggagtgggtctcaagcattagtggtgacagcgtaacaacatactacgcagactccgtgaagggccggttcaccatctccagagacaattccaagaacacgctgtatctgcaaatgaacagcctgagagccgaggacacggcggtgtactactgcgccaagggccctcctacataccacacaaactactactacatggacgtatggggcaagggtacaactgtcaccgtctcctca

SEQ ID NO: 819 - DNA, 1152 bp, synthetic construct
  source 1..1152: mol_type = other DNA
cccgctgctctgctgcctgcccggggtaccaacatggcccagaagcgtcctgcctgcaccctgaagcctgagtgtgtccagcagctgctggtttgctcccaggaggccaagaagtcagcctactgcccctacagtcactttcctgtgggggctgccctgctcacccaggaggggagaatcttcaaagggtgcaacatagaaaatgcctgctacccgctgggcatctgtgctgaacggaccgctatccagaaggccgtctcagaagggtacaaggatttcagggcaattgctatcgccagtgacatgcaagatgattttatctctccatgtggggcctgcaggcaagtcatgagagagtttggcaccaactggcccgtgtacatgaccaagccggatggtacgtatattggtggcgggggatcagacatccagatgacccagtctccatcctccctgtctgcatctgtaggagacagagtcaccatcacttgccgggcaagtcagagcattagcagctatttaaattggtatcagcagaaaccagggaaagcccctaagctcctgatctatgctgcatccagtttgcaaagtggggtcccatcaaggttcagtggcagtggatctgggacagatttcactctcaccatcagcagtctgcaacctgaagattttgcaacttactactgtcagcaaagctacatcgccccttacacttttggcggagggaccaaggttgagatcaaaggagggggcggatcaggcggaggtggatcgggagggggtggtagcgaggtgcagctggtggagtctgggggaggcttggtccagcctggagggtccctgagactctcctgtgcagcctctggattcaccttcagtgaccactacatggactgggtccgccaggctccagggaaggggctggagtgggttggccgtactagaaacaaagctagtagttacaccacagaatacgccgcgtctgtgaaaggcagattcaccatctcaagagatgattcaaagaactcactgtatctgcaaatgaacagcctgaaaaccgaggacacggcggtgtactactgcgccagagagcctaaatactggatcgacttcgacctatgggggagaggtaccttggtcaccgtctcctca

SEQ ID NO: 820 - DNA, 1125 bp, synthetic construct
  source 1..1125: mol_type = other DNA
cccgctgctctgctgcctgcccggggtaccaacatggcccagaagcgtcctgcctgcaccctgaagcctgagtgtgtccagcagctgctggtttgctcccaggaggccaagaagtcagcctactgcccctacagtcactttcctgtgggggctgccctgctcacccaggaggggagaatcttcaaagggtgcaacatagaaaatgcctgctacccgctgggcatctgtgctgaacggaccgctatccagaaggccgtctcagaagggtacaaggatttcagggcaattgctatcgccagtgacatgcaagatgattttatctctccatgtggggcctgcaggcaagtcatgagagagtttggcaccaactggcccgtgtacatgaccaagccggatggtacgtatattggtggcgggggatcagacatccagatgacccagtctccatcctccctgtctgcatctgtaggagacagagtcaccatcacttgccgggcaagtcagagcattagcagctatttaaattggtatcagcagaaaccagggaaagcccctaagctcctgatctatgctgcatccagtttgcaaagtggggtcccatcaaggttcagtggcagtggatctgggacagatttcactctcaccatcagcagtctgcaacctgaagattttgcaacttactactgtcagcaaagctacatcgccccttacacttttggcggagggaccaaggttgagatcaaaggagggggcggatcaggcggaggtggatcgggagggggtggtagcgaggtgcagctggtggagtctgggggaggcttggtacagccagggcggtccctgagactctcctgtacagcttctggattcaccttcagtgaccacgacatgaactgggtccgccaggctccagggaaggggctggagtgggttggccgtactagaaacgccgctggaagttacaccacagaatacgccgcgtctgtgaaaggcagattcaccatctcaagagatgattcaaagaactcactgtatctgcaaatgaacagcctgaaaaccgaggacacggcggtgtactactgcgccagagagcctaaatactggatcgacttcgacctatggggg

SEQ ID NO: 821 - DNA, 1152 bp, synthetic construct
  source 1..1152: mol_type = other DNA
cccgctgctctgctgcctgcccggggtaccaacatggcccagaagcgtcctgcctgcaccctgaagcctgagtgtgtccagcagctgctggtttgctcccaggaggccaagaagtcagcctactgcccctacagtcactttcctgtgggggctgccctgctcacccaggaggggagaatcttcaaagggtgcaacatagaaaatgcctgctacccgctgggcatctgtgctgaacggaccgctatccagaaggccgtctcagaagggtacaaggatttcagggcaattgctatcgccagtgacatgcaagatgattttatctctccatgtggggcctgcaggcaagtcatgagagagtttggcaccaactggcccgtgtacatgaccaagccggatggtacgtatattggtggcgggggatcagaggtgcagctggtggagtctgggggaggcttggtccagcctggagggtccctgagactctcctgtgcagcctctggattcaccttcgtagaccacgacatggactgggtccgccaggctccagggaaggggctggagtgggttggccgtactagaaacaaactaggaagttacaccacagaatacgccgcgtctgtgaaaggcagattcaccatctcaagagatgattcaaagaactcactgtatctgcaaatgaacagcctgaaaaccgaggacacggcggtgtactactgcgccagagagcctaaatactggatcgacttcgacctatgggggagaggtaccttggtcaccgtctcctcaggagggggcggatcaggcggaggtggatcgggagggggtggtagcgacatccagatgacccagtctccatcctccctgtctgcatctgtaggagacagagtcaccatcacttgccgggcaagtcagagcattagcagctatttaaattggtatcagcagaaaccagggaaagcccctaagctcctgatctatgctgcatccagtttgcaaagtggggtcccatcaaggttcagtggcagtggatgcggtacagatttcactctcaccatcagcagtctgcaacctgaagattttgcaacttactactgtcagcaaagctacatcgccccttacacttttggcggagggaccaaggttgagatcaaa

SEQ ID NO: 822 - DNA, 1188 bp, synthetic construct
  source 1..1188: mol_type = other DNA
cccgctgctctgctgcctgcccggggtaccaacatggcccagaagcgtcctgcctgcaccctgaagcctgagtgtgtccagcagctgctggtttgctcccaggaggccaagaagtcagcctactgcccctacagtcactttcctgtgggggctgccctgctcacccaggaggggagaatcttcaaagggtgcaacatagaaaatgcctgctacccgctgggcatctgtgctgaacggaccgctatccagaaggccgtctcagaagggtacaaggatttcagggcaattgctatcgccagtgacatgcaagatgattttatctctccatgtggggcctgcaggcaagtcatgagagagtttggcaccaactggcccgtgtacatgaccaagccggatggtacgtatattggagggggcggatcaggcggaggtggatcgggagggggtggtagcgacatccagatgacccagtctccatcttccgtgtctgcatctgtaggagacagagtcaccatcacttgtcgggcgagtcagggtattagcagctggttagcctggtatcagcagaaaccagggaaagcccctaagctcctgatctatgctgcatccagtttgcaaagtggggtcccatcaaggttcagcggcagtggatctgggacagatttcactctcaccatcagcagcctgcagcctgaagattttgcaacttattactgtcagcaaacaaatagtttcccttacacttttggcggagggaccaaggttgagatcaaaggagggggcggatcaggcggaggtggatcgggagggggtggtagcgaggtgcagctgttggagtctgggggaggcttggtacagcctggggggtccctgagactctcctgtgcagcctctggattcacctttagcaattatgccatgagctgggtccgccaggctccagggaaggggctggagtgggtctcagctattagtggtagtggtggtagcacatactacgcagactccgtgaagggccggttcaccatctccagagacaattccaagaacacgctgtatctgcaaatgaacagcctgagagccgaggacacggcggtgtactactgcgccaagggccctcctacataccacacaaactactactacatggacgtatggggcaagggtacaactgtcaccgtctcctca

SEQ ID NO: 823 - DNA, 1188 bp, synthetic construct
  source 1..1188: mol_type = other DNA
cccgctgctctgctgcctgcccggggtaccaacatggcccagaagcgtcctgcctgcaccctgaagcctgagtgtgtccagcagctgctggtttgctcccaggaggccaagaagtcagcctactgcccctacagtcactttcctgtgggggctgccctgctcacccaggaggggagaatcttcaaagggtgcaacatagaaaatgcctgctacccgctgggcatctgtgctgaacggaccgctatccagaaggccgtctcagaagggtacaaggatttcagggcaattgctatcgccagtgacatgcaagatgattttatctctccatgtggggcctgcaggcaagtcatgagagagtttggcaccaactggcccgtgtacatgaccaagccggatggtacgtatattggagggggcggatcaggcggaggtggatcgggagggggtggtagcgacatccagatgacccagtctccatcttccgtgtctgcatctgtaggagacagagtcaccatcacttgtcgggcgagtcagggtattagcagctggttagcctggtatcagcagaaaccagggaaagcccctaagctcctgatctatgctgcatccagtttgcaaagtggggtcccatcaaggttcagcggcagtggatctgggacagatttcactctcaccatcagcagcctgcagcctgaagattttgcaacttattactgtcagcaaacaaatagtttcccttacacttttggcggagggaccaaggttgagatcaaaggagggggcggatcaggcggaggtggatcgggagggggtggtagcgaggtgcagctgttggagtctgggggaggcttggtacagcctggggggtccctgagactctcctgtgcagcctctggattcacctttagcagctatgtcatgatctgggtccgccaggctccagggaaggggctggagtgggtctcaagcattagtggtgacagcgtaacaacatactacgcagactccgtgaagggccggttcaccatctccagagacaattccaagaacacgctgtatctgcaaatgaacagcctgagagccgaggacacggcggtgtactactgcgccaagggccctcctacataccacacaaactactactacatggacgtatggggcaagggtacaactgtcaccgtctcctca

SEQ ID NO: 824 - DNA, 1182 bp, synthetic construct
  source 1..1182: mol_type = other DNA
cccgctgctctgctgcctgcccggggtaccaacatggcccagaagcgtcctgcctgcaccctgaagcctgagtgtgtccagcagctgctggtttgctcccaggaggccaagaagtcagcctactgcccctacagtcactttcctgtgggggctgccctgctcacccaggaggggagaatcttcaaagggtgcaacatagaaaatgcctgctacccgctgggcatctgtgctgaacggaccgctatccagaaggccgtctcagaagggtacaaggatttcagggcaattgctatcgccagtgacatgcaagatgattttatctctccatgtggggcctgcaggcaagtcatgagagagtttggcaccaactggcccgtgtacatgaccaagccggatggtacgtatattggagggggcggatcaggcggaggtggatcgggagggggtggtagcgacatccagatgacccagtctccatcctccctgtctgcatctgtaggagacagagtcaccatcacttgccgggcaagtcagagcattagcagctatttaaattggtatcagcagaaaccagggaaagcccctaagctcctgatctatgctgcatccagtttgcaaagtggggtcccatcaaggttcagtggcagtggatctgggacagatttcactctcaccatcagcagtctgcaacctgaagattttgcaacttactactgtcagcaaagctacatcgccccttacacttttggcggagggaccaaggttgagatcaaaggagggggcggatcaggcggaggtggatcgggagggggtggtagcgaggtgcagctggtggagtctgggggaggcttggtccagcctggagggtccctgagactctcctgtgcagcctctggattcaccttcagtgaccactacatggactgggtccgccaggctccagggaaggggctggagtgggttggccgtactagaaacaaagctagtagttacaccacagaatacgccgcgtctgtgaaaggcagattcaccatctcaagagatgattcaaagaactcactgtatctgcaaatgaacagcctgaaaaccgaggacacggcggtgtactactgcgccagagagcctaaatactggatcgacttcgacctatgggggagaggtaccttggtcaccgtctcctca

SEQ ID NO: 825 - DNA, 1155 bp, synthetic construct
  source 1..1155: mol_type = other DNA
cccgctgctctgctgcctgcccggggtaccaacatggcccagaagcgtcctgcctgcaccctgaagcctgagtgtgtccagcagctgctggtttgctcccaggaggccaagaagtcagcctactgcccctacagtcactttcctgtgggggctgccctgctcacccaggaggggagaatcttcaaagggtgcaacatagaaaatgcctgctacccgctgggcatctgtgctgaacggaccgctatccagaaggccgtctcagaagggtacaaggatttcagggcaattgctatcgccagtgacatgcaagatgattttatctctccatgtggggcctgcaggcaagtcatgagagagtttggcaccaactggcccgtgtacatgaccaagccggatggtacgtatattggagggggcggatcaggcggaggtggatcgggagggggtggtagcgacatccagatgacccagtctccatcctccctgtctgcatctgtaggagacagagtcaccatcacttgccgggcaagtcagagcattagcagctatttaaattggtatcagcagaaaccagggaaagcccctaagctcctgatctatgctgcatccagtttgcaaagtggggtcccatcaaggttcagtggcagtggatctgggacagatttcactctcaccatcagcagtctgcaacctgaagattttgcaacttactactgtcagcaaagctacatcgccccttacacttttggcggagggaccaaggttgagatcaaaggagggggcggatcaggcggaggtggatcgggagggggtggtagcgaggtgcagctggtggagtctgggggaggcttggtacagccagggcggtccctgagactctcctgtacagcttctggattcaccttcagtgaccacgacatgaactgggtccgccaggctccagggaaggggctggagtgggttggccgtactagaaacgccgctggaagttacaccacagaatacgccgcgtctgtgaaaggcagattcaccatctcaagagatgattcaaagaactcactgtatctgcaaatgaacagcctgaaaaccgaggacacggcggtgtactactgcgccagagagcctaaatactggatcgacttcgacctatggggg

SEQ ID NO: 826 - DNA, 1182 bp, synthetic construct
  source 1..1182: mol_type = other DNA
cccgctgctctgctgcctgcccggggtaccaacatggcccagaagcgtcctgcctgcaccctgaagcctgagtgtgtccagcagctgctggtttgctcccaggaggccaagaagtcagcctactgcccctacagtcactttcctgtgggggctgccctgctcacccaggaggggagaatcttcaaagggtgcaacatagaaaatgcctgctacccgctgggcatctgtgctgaacggaccgctatccagaaggccgtctcagaagggtacaaggatttcagggcaattgctatcgccagtgacatgcaagatgattttatctctccatgtggggcctgcaggcaagtcatgagagagtttggcaccaactggcccgtgtacatgaccaagccggatggtacgtatattggagggggcggatcaggcggaggtggatcgggagggggtggtagcgaggtgcagctggtggagtctgggggaggcttggtccagcctggagggtccctgagactctcctgtgcagcctctggattcaccttcgtagaccacgacatggactgggtccgccaggctccagggaaggggctggagtgggttggccgtactagaaacaaactaggaagttacaccacagaatacgccgcgtctgtgaaaggcagattcaccatctcaagagatgattcaaagaactcactgtatctgcaaatgaacagcctgaaaaccgaggacacggcggtgtactactgcgccagagagcctaaatactggatcgacttcgacctatgggggagaggtaccttggtcaccgtctcctcaggagggggcggatcaggcggaggtggatcgggagggggtggtagcgacatccagatgacccagtctccatcctccctgtctgcatctgtaggagacagagtcaccatcacttgccgggcaagtcagagcattagcagctatttaaattggtatcagcagaaaccagggaaagcccctaagctcctgatctatgctgcatccagtttgcaaagtggggtcccatcaaggttcagtggcagtggatgcggtacagatttcactctcaccatcagcagtctgcaacctgaagattttgcaacttactactgtcagcaaagctacatcgccccttacacttttggcggagggaccaaggttgagatcaaa

SEQ ID NO: 827 - DNA, 1203 bp, synthetic construct
  source 1..1203: mol_type = other DNA
cccgctgctctgctgcctgcccggggtaccaacatggcccagaagcgtcctgcctgcaccctgaagcctgagtgtgtccagcagctgctggtttgctcccaggaggccaagaagtcagcctactgcccctacagtcactttcctgtgggggctgccctgctcacccaggaggggagaatcttcaaagggtgcaacatagaaaatgcctgctacccgctgggcatctgtgctgaacggaccgctatccagaaggccgtctcagaagggtacaaggatttcagggcaattgctatcgccagtgacatgcaagatgattttatctctccatgtggggcctgcaggcaagtcatgagagagtttggcaccaactggcccgtgtacatgaccaagccggatggtacgtatattggtggaggcggttcgggtggagggggatctggtggcggaggtagcggtggcgggggatcagacatccagatgacccagtctccatcttccgtgtctgcatctgtaggagacagagtcaccatcacttgtcgggcgagtcagggtattagcagctggttagcctggtatcagcagaaaccagggaaagcccctaagctcctgatctatgctgcatccagtttgcaaagtggggtcccatcaaggttcagcggcagtggatctgggacagatttcactctcaccatcagcagcctgcagcctgaagattttgcaacttattactgtcagcaaacaaatagtttcccttacacttttggcggagggaccaaggttgagatcaaaggagggggcggatcaggcggaggtggatcgggagggggtggtagcgaggtgcagctgttggagtctgggggaggcttggtacagcctggggggtccctgagactctcctgtgcagcctctggattcacctttagcaattatgccatgagctgggtccgccaggctccagggaaggggctggagtgggtctcagctattagtggtagtggtggtagcacatactacgcagactccgtgaagggccggttcaccatctccagagacaattccaagaacacgctgtatctgcaaatgaacagcctgagagccgaggacacggcggtgtactactgcgccaagggccctcctacataccacacaaactactactacatggacgtatggggcaagggtacaactgtcaccgtctcctca

SEQ ID NO: 828 - DNA, 1203 bp, synthetic construct
  source 1..1203: mol_type = other DNA
cccgctgctctgctgcctgcccggggtaccaacatggcccagaagcgtcctgcctgcaccctgaagcctgagtgtgtccagcagctgctggtttgctcccaggaggccaagaagtcagcctactgcccctacagtcactttcctgtgggggctgccctgctcacccaggaggggagaatcttcaaagggtgcaacatagaaaatgcctgctacccgctgggcatctgtgctgaacggaccgctatccagaaggccgtctcagaagggtacaaggatttcagggcaattgctatcgccagtgacatgcaagatgattttatctctccatgtggggcctgcaggcaagtcatgagagagtttggcaccaactggcccgtgtacatgaccaagccggatggtacgtatattggtggaggcggttcgggtggagggggatctggtggcggaggtagcggtggcgggggatcagacatccagatgacccagtctccatcttccgtgtctgcatctgtaggagacagagtcaccatcacttgtcgggcgagtcagggtattagcagctggttagcctggtatcagcagaaaccagggaaagcccctaagctcctgatctatgctgcatccagtttgcaaagtggggtcccatcaaggttcagcggcagtggatctgggacagatttcactctcaccatcagcagcctgcagcctgaagattttgcaacttattactgtcagcaaacaaatagtttcccttacacttttggcggagggaccaaggttgagatcaaaggagggggcggatcaggcggaggtggatcgggagggggtggtagcgaggtgcagctgttggagtctgggggaggcttggtacagcctggggggtccctgagactctcctgtgcagcctctggattcacctttagcagctatgtcatgatctgggtccgccaggctccagggaaggggctggagtgggtctcaagcattagtggtgacagcgtaacaacatactacgcagactccgtgaagggccggttcaccatctccagagacaattccaagaacacgctgtatctgcaaatgaacagcctgagagccgaggacacggcggtgtactactgcgccaagggccctcctacataccacacaaactactactacatggacgtatggggcaagggtacaactgtcaccgtctcctca

SEQ ID NO: 829 - DNA, 1197 bp, synthetic construct
  source 1..1197: mol_type = other DNA
cccgctgctctgctgcctgcccggggtaccaacatggcccagaagcgtcctgcctgcaccctgaagcctgagtgtgtccagcagctgctggtttgctcccaggaggccaagaagtcagcctactgcccctacagtcactttcctgtgggggctgccctgctcacccaggaggggagaatcttcaaagggtgcaacatagaaaatgcctgctacccgctgggcatctgtgctgaacggaccgctatccagaaggccgtctcagaagggtacaaggatttcagggcaattgctatcgccagtgacatgcaagatgattttatctctccatgtggggcctgcaggcaagtcatgagagagtttggcaccaactggcccgtgtacatgaccaagccggatggtacgtatattggtggaggcggttcgggtggagggggatctggtggcggaggtagcggtggcgggggatcagacatccagatgacccagtctccatcctccctgtctgcatctgtaggagacagagtcaccatcacttgccgggcaagtcagagcattagcagctatttaaattggtatcagcagaaaccagggaaagcccctaagctcctgatctatgctgcatccagtttgcaaagtggggtcccatcaaggttcagtggcagtggatctgggacagatttcactctcaccatcagcagtctgcaacctgaagattttgcaacttactactgtcagcaaagctacatcgccccttacacttttggcggagggaccaaggttgagatcaaaggagggggcggatcaggcggaggtggatcgggagggggtggtagcgaggtgcagctggtggagtctgggggaggcttggtccagcctggagggtccctgagactctcctgtgcagcctctggattcaccttcagtgaccactacatggactgggtccgccaggctccagggaaggggctggagtgggttggccgtactagaaacaaagctagtagttacaccacagaatacgccgcgtctgtgaaaggcagattcaccatctcaagagatgattcaaagaactcactgtatctgcaaatgaacagcctgaaaaccgaggacacggcggtgtactactgcgccagagagcctaaatactggatcgacttcgacctatgggggagaggtaccttggtcaccgtctcctca

SEQ ID NO: 830 - DNA, 1170 bp, synthetic construct
  source 1..1170: mol_type = other DNA
cccgctgctctgctgcctgcccggggtaccaacatggcccagaagcgtcctgcctgcaccctgaagcctgagtgtgtccagcagctgctggtttgctcccaggaggccaagaagtcagcctactgcccctacagtcactttcctgtgggggctgccctgctcacccaggaggggagaatcttcaaagggtgcaacatagaaaatgcctgctacccgctgggcatctgtgctgaacggaccgctatccagaaggccgtctcagaagggtacaaggatttcagggcaattgctatcgccagtgacatgcaagatgattttatctctccatgtggggcctgcaggcaagtcatgagagagtttggcaccaactggcccgtgtacatgaccaagccggatggtacgtatattggtggaggcggttcgggtggagggggatctggtggcggaggtagcggtggcgggggatcagacatccagatgacccagtctccatcctccctgtctgcatctgtaggagacagagtcaccatcacttgccgggcaagtcagagcattagcagctatttaaattggtatcagcagaaaccagggaaagcccctaagctcctgatctatgctgcatccagtttgcaaagtggggtcccatcaaggttcagtggcagtggatctgggacagatttcactctcaccatcagcagtctgcaacctgaagattttgcaacttactactgtcagcaaagctacatcgccccttacacttttggcggagggaccaaggttgagatcaaaggagggggcggatcaggcggaggtggatcgggagggggtggtagcgaggtgcagctggtggagtctgggggaggcttggtacagccagggcggtccctgagactctcctgtacagcttctggattcaccttcagtgaccacgacatgaactgggtccgccaggctccagggaaggggctggagtgggttggccgtactagaaacgccgctggaagttacaccacagaatacgccgcgtctgtgaaaggcagattcaccatctcaagagatgattcaaagaactcactgtatctgcaaatgaacagcctgaaaaccgaggacacggcggtgtactactgcgccagagagcctaaatactggatcgacttcgacctatggggg

SEQ ID NO: 831 - DNA, 1197 bp, synthetic construct
  source 1..1197: mol_type = other DNA
cccgctgctctgctgcctgcccggggtaccaacatggcccagaagcgtcctgcctgcaccctgaagcctgagtgtgtccagcagctgctggtttgctcccaggaggccaagaagtcagcctactgcccctacagtcactttcctgtgggggctgccctgctcacccaggaggggagaatcttcaaagggtgcaacatagaaaatgcctgctacccgctgggcatctgtgctgaacggaccgctatccagaaggccgtctcagaagggtacaaggatttcagggcaattgctatcgccagtgacatgcaagatgattttatctctccatgtggggcctgcaggcaagtcatgagagagtttggcaccaactggcccgtgtacatgaccaagccggatggtacgtatattggtggaggcggttcgggtggagggggatctggtggcggaggtagcggtggcgggggatcagaggtgcagctggtggagtctgggggaggcttggtccagcctggagggtccctgagactctcctgtgcagcctctggattcaccttcgtagaccacgacatggactgggtccgccaggctccagggaaggggctggagtgggttggccgtactagaaacaaactaggaagttacaccacagaatacgccgcgtctgtgaaaggcagattcaccatctcaagagatgattcaaagaactcactgtatctgcaaatgaacagcctgaaaaccgaggacacggcggtgtactactgcgccagagagcctaaatactggatcgacttcgacctatgggggagaggtaccttggtcaccgtctcctcaggagggggcggatcaggcggaggtggatcgggagggggtggtagcgacatccagatgacccagtctccatcctccctgtctgcatctgtaggagacagagtcaccatcacttgccgggcaagtcagagcattagcagctatttaaattggtatcagcagaaaccagggaaagcccctaagctcctgatctatgctgcatccagtttgcaaagtggggtcccatcaaggttcagtggcagtggatgcggtacagatttcactctcaccatcagcagtctgcaacctgaagattttgcaacttactactgtcagcaaagctacatcgccccttacacttttggcggagggaccaaggttgagatcaaa

SEQ ID NO: 832 - DNA, 1218 bp, synthetic construct
  source 1..1218: mol_type = other DNA
cccgctgctctgctgcctgcccggggtaccaacatggcccagaagcgtcctgcctgcaccctgaagcctgagtgtgtccagcagctgctggtttgctcccaggaggccaagaagtcagcctactgcccctacagtcactttcctgtgggggctgccctgctcacccaggaggggagaatcttcaaagggtgcaacatagaaaatgcctgctacccgctgggcatctgtgctgaacggaccgctatccagaaggccgtctcagaagggtacaaggatttcagggcaattgctatcgccagtgacatgcaagatgattttatctctccatgtggggcctgcaggcaagtcatgagagagtttggcaccaactggcccgtgtacatgaccaagccggatggtacgtatattggtggaggcggttcgggtggagggggatctggtggcggaggtagcggtggcgggggatcaggtggcgggggatcagacatccagatgacccagtctccatcttccgtgtctgcatctgtaggagacagagtcaccatcacttgtcgggcgagtcagggtattagcagctggttagcctggtatcagcagaaaccagggaaagcccctaagctcctgatctatgctgcatccagtttgcaaagtggggtcccatcaaggttcagcggcagtggatctgggacagatttcactctcaccatcagcagcctgcagcctgaagattttgcaacttattactgtcagcaaacaaatagtttcccttacacttttggcggagggaccaaggttgagatcaaaggagggggcggatcaggcggaggtggatcgggagggggtggtagcgaggtgcagctgttggagtctgggggaggcttggtacagcctggggggtccctgagactctcctgtgcagcctctggattcacctttagcaattatgccatgagctgggtccgccaggctccagggaaggggctggagtgggtctcagctattagtggtagtggtggtagcacatactacgcagactccgtgaagggccggttcaccatctccagagacaattccaagaacacgctgtatctgcaaatgaacagcctgagagccgaggacacggcggtgtactactgcgccaagggccctcctacataccacacaaactactactacatggacgtatggggcaagggtacaactgtcaccgtctcctca

SEQ ID NO: 833 - DNA, 1218 bp, synthetic construct
  source 1..1218: mol_type = other DNA
cccgctgctctgctgcctgcccggggtaccaacatggcccagaagcgtcctgcctgcaccctgaagcctgagtgtgtccagcagctgctggtttgctcccaggaggccaagaagtcagcctactgcccctacagtcactttcctgtgggggctgccctgctcacccaggaggggagaatcttcaaagggtgcaacatagaaaatgcctgctacccgctgggcatctgtgctgaacggaccgctatccagaaggccgtctcagaagggtacaaggatttcagggcaattgctatcgccagtgacatgcaagatgattttatctctccatgtggggcctgcaggcaagtcatgagagagtttggcaccaactggcccgtgtacatgaccaagccggatggtacgtatattggtggaggcggttcgggtggagggggatctggtggcggaggtagcggtggcgggggatcaggtggcgggggatcagacatccagatgacccagtctccatcttccgtgtctgcatctgtaggagacagagtcaccatcacttgtcgggcgagtcagggtattagcagctggttagcctggtatcagcagaaaccagggaaagcccctaagctcctgatctatgctgcatccagtttgcaaagtggggtcccatcaaggttcagcggcagtggatctgggacagatttcactctcaccatcagcagcctgcagcctgaagattttgcaacttattactgtcagcaaacaaatagtttcccttacacttttggcggagggaccaaggttgagatcaaaggagggggcggatcaggcggaggtggatcgggagggggtggtagcgaggtgcagctgttggagtctgggggaggcttggtacagcctggggggtccctgagactctcctgtgcagcctctggattcacctttagcagctatgtcatgatctgggtccgccaggctccagggaaggggctggagtgggtctcaagcattagtggtgacagcgtaacaacatactacgcagactccgtgaagggccggttcaccatctccagagacaattccaagaacacgctgtatctgcaaatgaacagcctgagagccgaggacacggcggtgtactactgcgccaagggccctcctacataccacacaaactactactacatggacgtatggggcaagggtacaactgtcaccgtctcctca

SEQ ID NO: 834 - DNA, 1212 bp, synthetic construct
  source 1..1212: mol_type = other DNA
cccgctgctctgctgcctgcccggggtaccaacatggcccagaagcgtcctgcctgcaccctgaagcctgagtgtgtccagcagctgctggtttgctcccaggaggccaagaagtcagcctactgcccctacagtcactttcctgtgggggctgccctgctcacccaggaggggagaatcttcaaagggtgcaacatagaaaatgcctgctacccgctgggcatctgtgctgaacggaccgctatccagaaggccgtctcagaagggtacaaggatttcagggcaattgctatcgccagtgacatgcaagatgattttatctctccatgtggggcctgcaggcaagtcatgagagagtttggcaccaactggcccgtgtacatgaccaagccggatggtacgtatattggtggaggcggttcgggtggagggggatctggtggcggaggtagcggtggcgggggatcaggtggcgggggatcagacatccagatgacccagtctccatcctccctgtctgcatctgtaggagacagagtcaccatcacttgccgggcaagtcagagcattagcagctatttaaattggtatcagcagaaaccagggaaagcccctaagctcctgatctatgctgcatccagtttgcaaagtggggtcccatcaaggttcagtggcagtggatctgggacagatttcactctcaccatcagcagtctgcaacctgaagattttgcaacttactactgtcagcaaagctacatcgccccttacacttttggcggagggaccaaggttgagatcaaaggagggggcggatcaggcggaggtggatcgggagggggtggtagcgaggtgcagctggtggagtctgggggaggcttggtccagcctggagggtccctgagactctcctgtgcagcctctggattcaccttcagtgaccactacatggactgggtccgccaggctccagggaaggggctggagtgggttggccgtactagaaacaaagctagtagttacaccacagaatacgccgcgtctgtgaaaggcagattcaccatctcaagagatgattcaaagaactcactgtatctgcaaatgaacagcctgaaaaccgaggacacggcggtgtactactgcgccagagagcctaaatactggatcgacttcgacctatgggggagaggtaccttggtcaccgtctcctca

SEQ ID NO: 835 - DNA, 1185 bp, synthetic construct
  source 1..1185: mol_type = other DNA
cccgctgctctgctgcctgcccggggtaccaacatggcccagaagcgtcctgcctgcaccctgaagcctgagtgtgtccagcagctgctggtttgctcccaggaggccaagaagtcagcctactgcccctacagtcactttcctgtgggggctgccctgctcacccaggaggggagaatcttcaaagggtgcaacatagaaaatgcctgctacccgctgggcatctgtgctgaacggaccgctatccagaaggccgtctcagaagggtacaaggatttcagggcaattgctatcgccagtgacatgcaagatgattttatctctccatgtggggcctgcaggcaagtcatgagagagtttggcaccaactggcccgtgtacatgaccaagccggatggtacgtatattggtggaggcggttcgggtggagggggatctggtggcggaggtagcggtggcgggggatcaggtggcgggggatcagacatccagatgacccagtctccatcctccctgtctgcatctgtaggagacagagtcaccatcacttgccgggcaagtcagagcattagcagctatttaaattggtatcagcagaaaccagggaaagcccctaagctcctgatctatgctgcatccagtttgcaaagtggggtcccatcaaggttcagtggcagtggatctgggacagatttcactctcaccatcagcagtctgcaacctgaagattttgcaacttactactgtcagcaaagctacatcgccccttacacttttggcggagggaccaaggttgagatcaaaggagggggcggatcaggcggaggtggatcgggagggggtggtagcgaggtgcagctggtggagtctgggggaggcttggtacagccagggcggtccctgagactctcctgtacagcttctggattcaccttcagtgaccacgacatgaactgggtccgccaggctccagggaaggggctggagtgggttggccgtactagaaacgccgctggaagttacaccacagaatacgccgcgtctgtgaaaggcagattcaccatctcaagagatgattcaaagaactcactgtatctgcaaatgaacagcctgaaaaccgaggacacggcggtgtactactgcgccagagagcctaaatactggatcgacttcgacctatggggg

SEQ ID NO: 836 - DNA, 1212 bp, synthetic construct
  source 1..1212: mol_type = other DNA
cccgctgctctgctgcctgcccggggtaccaacatggcccagaagcgtcctgcctgcaccctgaagcctgagtgtgtccagcagctgctggtttgctcccaggaggccaagaagtcagcctactgcccctacagtcactttcctgtgggggctgccctgctcacccaggaggggagaatcttcaaagggtgcaacatagaaaatgcctgctacccgctgggcatctgtgctgaacggaccgctatccagaaggccgtctcagaagggtacaaggatttcagggcaattgctatcgccagtgacatgcaagatgattttatctctccatgtggggcctgcaggcaagtcatgagagagtttggcaccaactggcccgtgtacatgaccaagccggatggtacgtatattggtggaggcggttcgggtggagggggatctggtggcggaggtagcggtggcgggggatcaggtggcgggggatcagaggtgcagctggtggagtctgggggaggcttggtccagcctggagggtccctgagactctcctgtgcagcctctggattcaccttcgtagaccacgacatggactgggtccgccaggctccagggaaggggctggagtgggttggccgtactagaaacaaactaggaagttacaccacagaatacgccgcgtctgtgaaaggcagattcaccatctcaagagatgattcaaagaactcactgtatctgcaaatgaacagcctgaaaaccgaggacacggcggtgtactactgcgccagagagcctaaatactggatcgacttcgacctatgggggagaggtaccttggtcaccgtctcctcaggagggggcggatcaggcggaggtggatcgggagggggtggtagcgacatccagatgacccagtctccatcctccctgtctgcatctgtaggagacagagtcaccatcacttgccgggcaagtcagagcattagcagctatttaaattggtatcagcagaaaccagggaaagcccctaagctcctgatctatgctgcatccagtttgcaaagtggggtcccatcaaggttcagtggcagtggatgcggtacagatttcactctcaccatcagcagtctgcaacctgaagattttgcaacttactactgtcagcaaagctacatcgccccttacacttttggcggagggaccaaggttgagatcaaa

SEQ ID NO: 837 - DNA, 1233 bp, synthetic construct
  source 1..1233: mol_type = other DNA
cccgctgctctgctgcctgcccggggtaccaacatggcccagaagcgtcctgcctgcaccctgaagcctgagtgtgtccagcagctgctggtttgctcccaggaggccaagaagtcagcctactgcccctacagtcactttcctgtgggggctgccctgctcacccaggaggggagaatcttcaaagggtgcaacatagaaaatgcctgctacccgctgggcatctgtgctgaacggaccgctatccagaaggccgtctcagaagggtacaaggatttcagggcaattgctatcgccagtgacatgcaagatgattttatctctccatgtggggcctgcaggcaagtcatgagagagtttggcaccaactggcccgtgtacatgaccaagccggatggtacgtatattggtggaggcggttcgggtggagggggatctggtggcggaggtagcggtggcgggggatcaggtggcgggggatcaggtggcgggggatcagacatccagatgacccagtctccatcttccgtgtctgcatctgtaggagacagagtcaccatcacttgtcgggcgagtcagggtattagcagctggttagcctggtatcagcagaaaccagggaaagcccctaagctcctgatctatgctgcatccagtttgcaaagtggggtcccatcaaggttcagcggcagtggatctgggacagatttcactctcaccatcagcagcctgcagcctgaagattttgcaacttattactgtcagcaaacaaatagtttcccttacacttttggcggagggaccaaggttgagatcaaaggagggggcggatcaggcggaggtggatcgggagggggtggtagcgaggtgcagctgttggagtctgggggaggcttggtacagcctggggggtccctgagactctcctgtgcagcctctggattcacctttagcaattatgccatgagctgggtccgccaggctccagggaaggggctggagtgggtctcagctattagtggtagtggtggtagcacatactacgcagactccgtgaagggccggttcaccatctccagagacaattccaagaacacgctgtatctgcaaatgaacagcctgagagccgaggacacggcggtgtactactgcgccaagggccctcctacataccacacaaactactactacatggacgtatggggcaagggtacaactgtcaccgtctcctca

SEQ ID NO: 838 - DNA, 1233 bp, synthetic construct
  source 1..1233: mol_type = other DNA
cccgctgctctgctgcctgcccggggtaccaacatggcccagaagcgtcctgcctgcaccctgaagcctgagtgtgtccagcagctgctggtttgctcccaggaggccaagaagtcagcctactgcccctacagtcactttcctgtgggggctgccctgctcacccaggaggggagaatcttcaaagggtgcaacatagaaaatgcctgctacccgctgggcatctgtgctgaacggaccgctatccagaaggccgtctcagaagggtacaaggatttcagggcaattgctatcgccagtgacatgcaagatgattttatctctccatgtggggcctgcaggcaagtcatgagagagtttggcaccaactggcccgtgtacatgaccaagccggatggtacgtatattggtggaggcggttcgggtggagggggatctggtggcggaggtagcggtggcgggggatcaggtggcgggggatcaggtggcgggggatcagacatccagatgacccagtctccatcttccgtgtctgcatctgtaggagacagagtcaccatcacttgtcgggcgagtcagggtattagcagctggttagcctggtatcagcagaaaccagggaaagcccctaagctcctgatctatgctgcatccagtttgcaaagtggggtcccatcaaggttcagcggcagtggatctgggacagatttcactctcaccatcagcagcctgcagcctgaagattttgcaacttattactgtcagcaaacaaatagtttcccttacacttttggcggagggaccaaggttgagatcaaaggagggggcggatcaggcggaggtggatcgggagggggtggtagcgaggtgcagctgttggagtctgggggaggcttggtacagcctggggggtccctgagactctcctgtgcagcctctggattcacctttagcagctatgtcatgatctgggtccgccaggctccagggaaggggctggagtgggtctcaagcattagtggtgacagcgtaacaacatactacgcagactccgtgaagggccggttcaccatctccagagacaattccaagaacacgctgtatctgcaaatgaacagcctgagagccgaggacacggcggtgtactactgcgccaagggccctcctacataccacacaaactactactacatggacgtatggggcaagggtacaactgtcaccgtctcctca

SEQ ID NO: 839 - DNA, 1227 bp, synthetic construct
  source 1..1227: mol_type = other DNA
cccgctgctctgctgcctgcccggggtaccaacatggcccagaagcgtcctgcctgcaccctgaagcctgagtgtgtccagcagctgctggtttgctcccaggaggccaagaagtcagcctactgcccctacagtcactttcctgtgggggctgccctgctcacccaggaggggagaatcttcaaagggtgcaacatagaaaatgcctgctacccgctgggcatctgtgctgaacggaccgctatccagaaggccgtctcagaagggtacaaggatttcagggcaattgctatcgccagtgacatgcaagatgattttatctctccatgtggggcctgcaggcaagtcatgagagagtttggcaccaactggcccgtgtacatgaccaagccggatggtacgtatattggtggaggcggttcgggtggagggggatctggtggcggaggtagcggtggcgggggatcaggtggcgggggatcaggtggcgggggatcagacatccagatgacccagtctccatcctccctgtctgcatctgtaggagacagagtcaccatcacttgccgggcaagtcagagcattagcagctatttaaattggtatcagcagaaaccagggaaagcccctaagctcctgatctatgctgcatccagtttgcaaagtggggtcccatcaaggttcagtggcagtggatctgggacagatttcactctcaccatcagcagtctgcaacctgaagattttgcaacttactactgtcagcaaagctacatcgccccttacacttttggcggagggaccaaggttgagatcaaaggagggggcggatcaggcggaggtggatcgggagggggtggtagcgaggtgcagctggtggagtctgggggaggcttggtccagcctggagggtccctgagactctcctgtgcagcctctggattcaccttcagtgaccactacatggactgggtccgccaggctccagggaaggggctggagtgggttggccgtactagaaacaaagctagtagttacaccacagaatacgccgcgtctgtgaaaggcagattcaccatctcaagagatgattcaaagaactcactgtatctgcaaatgaacagcctgaaaaccgaggacacggcggtgtactactgcgccagagagcctaaatactggatcgacttcgacctatgggggagaggtaccttggtcaccgtctcctca

SEQ ID NO: 840 - DNA, 1200 bp, synthetic construct
  source 1..1200: mol_type = other DNA
cccgctgctctgctgcctgcccggggtaccaacatggcccagaagcgtcctgcctgcaccctgaagcctgagtgtgtccagcagctgctggtttgctcccaggaggccaagaagtcagcctactgcccctacagtcactttcctgtgggggctgccctgctcacccaggaggggagaatcttcaaagggtgcaacatagaaaatgcctgctacccgctgggcatctgtgctgaacggaccgctatccagaaggccgtctcagaagggtacaaggatttcagggcaattgctatcgccagtgacatgcaagatgattttatctctccatgtggggcctgcaggcaagtcatgagagagtttggcaccaactggcccgtgtacatgaccaagccggatggtacgtatattggtggaggcggttcgggtggagggggatctggtggcggaggtagcggtggcgggggatcaggtggcgggggatcaggtggcgggggatcagacatccagatgacccagtctccatcctccctgtctgcatctgtaggagacagagtcaccatcacttgccgggcaagtcagagcattagcagctatttaaattggtatcagcagaaaccagggaaagcccctaagctcctgatctatgctgcatccagtttgcaaagtggggtcccatcaaggttcagtggcagtggatctgggacagatttcactctcaccatcagcagtctgcaacctgaagattttgcaacttactactgtcagcaaagctacatcgccccttacacttttggcggagggaccaaggttgagatcaaaggagggggcggatcaggcggaggtggatcgggagggggtggtagcgaggtgcagctggtggagtctgggggaggcttggtacagccagggcggtccctgagactctcctgtacagcttctggattcaccttcagtgaccacgacatgaactgggtccgccaggctccagggaaggggctggagtgggttggccgtactagaaacgccgctggaagttacaccacagaatacgccgcgtctgtgaaaggcagattcaccatctcaagagatgattcaaagaactcactgtatctgcaaatgaacagcctgaaaaccgaggacacggcggtgtactactgcgccagagagcctaaatactggatcgacttcgacctatggggg

SEQ ID NO: 841 - DNA, 1227 bp, synthetic construct
  source 1..1227: mol_type = other DNA
cccgctgctctgctgcctgcccggggtaccaacatggcccagaagcgtcctgcctgcaccctgaagcctgagtgtgtccagcagctgctggtttgctcccaggaggccaagaagtcagcctactgcccctacagtcactttcctgtgggggctgccctgctcacccaggaggggagaatcttcaaagggtgcaacatagaaaatgcctgctacccgctgggcatctgtgctgaacggaccgctatccagaaggccgtctcagaagggtacaaggatttcagggcaattgctatcgccagtgacatgcaagatgattttatctctccatgtggggcctgcaggcaagtcatgagagagtttggcaccaactggcccgtgtacatgaccaagccggatggtacgtatattggtggaggcggttcgggtggagggggatctggtggcggaggtagcggtggcgggggatcaggtggcgggggatcaggtggcgggggatcagaggtgcagctggtggagtctgggggaggcttggtccagcctggagggtccctgagactctcctgtgcagcctctggattcaccttcgtagaccacgacatggactgggtccgccaggctccagggaaggggctggagtgggttggccgtactagaaacaaactaggaagttacaccacagaatacgccgcgtctgtgaaaggcagattcaccatctcaagagatgattcaaagaactcactgtatctgcaaatgaacagcctgaaaaccgaggacacggcggtgtactactgcgccagagagcctaaatactggatcgacttcgacctatgggggagaggtaccttggtcaccgtctcctcaggagggggcggatcaggcggaggtggatcgggagggggtggtagcgacatccagatgacccagtctccatcctccctgtctgcatctgtaggagacagagtcaccatcacttgccgggcaagtcagagcattagcagctatttaaattggtatcagcagaaaccagggaaagcccctaagctcctgatctatgctgcatccagtttgcaaagtggggtcccatcaaggttcagtggcagtggatgcggtacagatttcactctcaccatcagcagtctgcaacctgaagattttgcaacttactactgtcagcaaagctacatcgccccttacacttttggcggagggaccaaggttgagatcaaa

SEQ ID NO: 842 - DNA, 1248 bp, synthetic construct
  source 1..1248: mol_type = other DNA
cccgctgctctgctgcctgcccggggtaccaacatggcccagaagcgtcctgcctgcaccctgaagcctgagtgtgtccagcagctgctggtttgctcccaggaggccaagaagtcagcctactgcccctacagtcactttcctgtgggggctgccctgctcacccaggaggggagaatcttcaaagggtgcaacatagaaaatgcctgctacccgctgggcatctgtgctgaacggaccgctatccagaaggccgtctcagaagggtacaaggatttcagggcaattgctatcgccagtgacatgcaagatgattttatctctccatgtggggcctgcaggcaagtcatgagagagtttggcaccaactggcccgtgtacatgaccaagccggatggtacgtatattggtggaggcggttcgggtggagggggatctggtggcggaggtagcggtggcgggggatcaggtggcgggggatcaggtggcgggggatcaggtggcgggggatcagacatccagatgacccagtctccatcttccgtgtctgcatctgtaggagacagagtcaccatcacttgtcgggcgagtcagggtattagcagctggttagcctggtatcagcagaaaccagggaaagcccctaagctcctgatctatgctgcatccagtttgcaaagtggggtcccatcaaggttcagcggcagtggatctgggacagatttcactctcaccatcagcagcctgcagcctgaagattttgcaacttattactgtcagcaaacaaatagtttcccttacacttttggcggagggaccaaggttgagatcaaaggagggggcggatcaggcggaggtggatcgggagggggtggtagcgaggtgcagctgttggagtctgggggaggcttggtacagcctggggggtccctgagactctcctgtgcagcctctggattcacctttagcaattatgccatgagctgggtccgccaggctccagggaaggggctggagtgggtctcagctattagtggtagtggtggtagcacatactacgcagactccgtgaagggccggttcaccatctccagagacaattccaagaacacgctgtatctgcaaatgaacagcctgagagccgaggacacggcggtgtactactgcgccaagggccctcctacataccacacaaactactactacatggacgtatggggcaagggtacaactgtcaccgtctcctca

SEQ ID NO: 843 - DNA, 1248 bp, synthetic construct
  source 1..1248: mol_type = other DNA
cccgctgctctgctgcctgcccggggtaccaacatggcccagaagcgtcctgcctgcaccctgaagcctgagtgtgtccagcagctgctggtttgctcccaggaggccaagaagtcagcctactgcccctacagtcactttcctgtgggggctgccctgctcacccaggaggggagaatcttcaaagggtgcaacatagaaaatgcctgctacccgctgggcatctgtgctgaacggaccgctatccagaaggccgtctcagaagggtacaaggatttcagggcaattgctatcgccagtgacatgcaagatgattttatctctccatgtggggcctgcaggcaagtcatgagagagtttggcaccaactggcccgtgtacatgaccaagccggatggtacgtatattggtggaggcggttcgggtggagggggatctggtggcggaggtagcggtggcgggggatcaggtggcgggggatcaggtggcgggggatcaggtggcgggggatcagacatccagatgacccagtctccatcttccgtgtctgcatctgtaggagacagagtcaccatcacttgtcgggcgagtcagggtattagcagctggttagcctggtatcagcagaaaccagggaaagcccctaagctcctgatctatgctgcatccagtttgcaaagtggggtcccatcaaggttcagcggcagtggatctgggacagatttcactctcaccatcagcagcctgcagcctgaagattttgcaacttattactgtcagcaaacaaatagtttcccttacacttttggcggagggaccaaggttgagatcaaaggagggggcggatcaggcggaggtggatcgggagggggtggtagcgaggtgcagctgttggagtctgggggaggcttggtacagcctggggggtccctgagactctcctgtgcagcctctggattcacctttagcagctatgtcatgatctgggtccgccaggctccagggaaggggctggagtgggtctcaagcattagtggtgacagcgtaacaacatactacgcagactccgtgaagggccggttcaccatctccagagacaattccaagaacacgctgtatctgcaaatgaacagcctgagagccgaggacacggcggtgtactactgcgccaagggccctcctacataccacacaaactactactacatggacgtatggggcaagggtacaactgtcaccgtctcctca

SEQ ID NO: 844 - DNA, 1242 bp, synthetic construct
  source 1..1242: mol_type = other DNA
cccgctgctctgctgcctgcccggggtaccaacatggcccagaagcgtcctgcctgcaccctgaagcctgagtgtgtccagcagctgctggtttgctcccaggaggccaagaagtcagcctactgcccctacagtcactttcctgtgggggctgccctgctcacccaggaggggagaatcttcaaagggtgcaacatagaaaatgcctgctacccgctgggcatctgtgctgaacggaccgctatccagaaggccgtctcagaagggtacaaggatttcagggcaattgctatcgccagtgacatgcaagatgattttatctctccatgtggggcctgcaggcaagtcatgagagagtttggcaccaactggcccgtgtacatgaccaagccggatggtacgtatattggtggaggcggttcgggtggagggggatctggtggcggaggtagcggtggcgggggatcaggtggcgggggatcaggtggcgggggatcaggtggcgggggatcagacatccagatgacccagtctccatcctccctgtctgcatctgtaggagacagagtcaccatcacttgccgggcaagtcagagcattagcagctatttaaattggtatcagcagaaaccagggaaagcccctaagctcctgatctatgctgcatccagtttgcaaagtggggtcccatcaaggttcagtggcagtggatctgggacagatttcactctcaccatcagcagtctgcaacctgaagattttgcaacttactactgtcagcaaagctacatcgccccttacacttttggcggagggaccaaggttgagatcaaaggagggggcggatcaggcggaggtggatcgggagggggtggtagcgaggtgcagctggtggagtctgggggaggcttggtccagcctggagggtccctgagactctcctgtgcagcctctggattcaccttcagtgaccactacatggactgggtccgccaggctccagggaaggggctggagtgggttggccgtactagaaacaaagctagtagttacaccacagaatacgccgcgtctgtgaaaggcagattcaccatctcaagagatgattcaaagaactcactgtatctgcaaatgaacagcctgaaaaccgaggacacggcggtgtactactgcgccagagagcctaaatactggatcgacttcgacctatgggggagaggtaccttggtcaccgtctcctca

SEQ ID NO: 845 - DNA, 1215 bp, synthetic construct
  source 1..1215: mol_type = other DNA
cccgctgctctgctgcctgcccggggtaccaacatggcccagaagcgtcctgcctgcaccctgaagcctgagtgtgtccagcagctgctggtttgctcccaggaggccaagaagtcagcctactgcccctacagtcactttcctgtgggggctgccctgctcacccaggaggggagaatcttcaaagggtgcaacatagaaaatgcctgctacccgctgggcatctgtgctgaacggaccgctatccagaaggccgtctcagaagggtacaaggatttcagggcaattgctatcgccagtgacatgcaagatgattttatctctccatgtggggcctgcaggcaagtcatgagagagtttggcaccaactggcccgtgtacatgaccaagccggatggtacgtatattggtggaggcggttcgggtggagggggatctggtggcggaggtagcggtggcgggggatcaggtggcgggggatcaggtggcgggggatcaggtggcgggggatcagacatccagatgacccagtctccatcctccctgtctgcatctgtaggagacagagtcaccatcacttgccgggcaagtcagagcattagcagctatttaaattggtatcagcagaaaccagggaaagcccctaagctcctgatctatgctgcatccagtttgcaaagtggggtcccatcaaggttcagtggcagtggatctgggacagatttcactctcaccatcagcagtctgcaacctgaagattttgcaacttactactgtcagcaaagctacatcgccccttacacttttggcggagggaccaaggttgagatcaaaggagggggcggatcaggcggaggtggatcgggagggggtggtagcgaggtgcagctggtggagtctgggggaggcttggtacagccagggcggtccctgagactctcctgtacagcttctggattcaccttcagtgaccacgacatgaactgggtccgccaggctccagggaaggggctggagtgggttggccgtactagaaacgccgctggaagttacaccacagaatacgccgcgtctgtgaaaggcagattcaccatctcaagagatgattcaaagaactcactgtatctgcaaatgaacagcctgaaaaccgaggacacggcggtgtactactgcgccagagagcctaaatactggatcgacttcgacctatggggg

SEQ ID NO: 846 - DNA, 1242 bp, synthetic construct
  source 1..1242: mol_type = other DNA
cccgctgctctgctgcctgcccggggtaccaacatggcccagaagcgtcctgcctgcaccctgaagcctgagtgtgtccagcagctgctggtttgctcccaggaggccaagaagtcagcctactgcccctacagtcactttcctgtgggggctgccctgctcacccaggaggggagaatcttcaaagggtgcaacatagaaaatgcctgctacccgctgggcatctgtgctgaacggaccgctatccagaaggccgtctcagaagggtacaaggatttcagggcaattgctatcgccagtgacatgcaagatgattttatctctccatgtggggcctgcaggcaagtcatgagagagtttggcaccaactggcccgtgtacatgaccaagccggatggtacgtatattggtggaggcggttcgggtggagggggatctggtggcggaggtagcggtggcgggggatcaggtggcgggggatcaggtggcgggggatcaggtggcgggggatcagaggtgcagctggtggagtctgggggaggcttggtccagcctggagggtccctgagactctcctgtgcagcctctggattcaccttcgtagaccacgacatggactgggtccgccaggctccagggaaggggctggagtgggttggccgtactagaaacaaactaggaagttacaccacagaatacgccgcgtctgtgaaaggcagattcaccatctcaagagatgattcaaagaactcactgtatctgcaaatgaacagcctgaaaaccgaggacacggcggtgtactactgcgccagagagcctaaatactggatcgacttcgacctatgggggagaggtaccttggtcaccgtctcctcaggagggggcggatcaggcggaggtggatcgggagggggtggtagcgacatccagatgacccagtctccatcctccctgtctgcatctgtaggagacagagtcaccatcacttgccgggcaagtcagagcattagcagctatttaaattggtatcagcagaaaccagggaaagcccctaagctcctgatctatgctgcatccagtttgcaaagtggggtcccatcaaggttcagtggcagtggatgcggtacagatttcactctcaccatcagcagtctgcaacctgaagattttgcaacttactactgtcagcaaagctacatcgccccttacacttttggcggagggaccaaggttgagatcaaa

SEQ ID NO: 847 - DNA, 1263 bp, synthetic construct
  source 1..1263: mol_type = other DNA
cccgctgctctgctgcctgcccggggtaccaacatggcccagaagcgtcctgcctgcaccctgaagcctgagtgtgtccagcagctgctggtttgctcccaggaggccaagaagtcagcctactgcccctacagtcactttcctgtgggggctgccctgctcacccaggaggggagaatcttcaaagggtgcaacatagaaaatgcctgctacccgctgggcatctgtgctgaacggaccgctatccagaaggccgtctcagaagggtacaaggatttcagggcaattgctatcgccagtgacatgcaagatgattttatctctccatgtggggcctgcaggcaagtcatgagagagtttggcaccaactggcccgtgtacatgaccaagccggatggtacgtatattggtggaggcggttcgggtggagggggatctggtggcggaggtagcggtggcgggggatcaggtggcgggggatcaggtggcgggggatcaggtggcgggggatcaggtggcgggggatcagacatccagatgacccagtctccatcttccgtgtctgcatctgtaggagacagagtcaccatcacttgtcgggcgagtcagggtattagcagctggttagcctggtatcagcagaaaccagggaaagcccctaagctcctgatctatgctgcatccagtttgcaaagtggggtcccatcaaggttcagcggcagtggatctgggacagatttcactctcaccatcagcagcctgcagcctgaagattttgcaacttattactgtcagcaaacaaatagtttcccttacacttttggcggagggaccaaggttgagatcaaaggagggggcggatcaggcggaggtggatcgggagggggtggtagcgaggtgcagctgttggagtctgggggaggcttggtacagcctggggggtccctgagactctcctgtgcagcctctggattcacctttagcaattatgccatgagctgggtccgccaggctccagggaaggggctggagtgggtctcagctattagtggtagtggtggtagcacatactacgcagactccgtgaagggccggttcaccatctccagagacaattccaagaacacgctgtatctgcaaatgaacagcctgagagccgaggacacggcggtgtactactgcgccaagggccctcctacataccacacaaactactactacatggacgtatggggcaagggtacaactgtcaccgtctcctca

SEQ ID NO: 848 - DNA, 1263 bp, synthetic construct
  source 1..1263: mol_type = other DNA
cccgctgctctgctgcctgcccggggtaccaacatggcccagaagcgtcctgcctgcaccctgaagcctgagtgtgtccagcagctgctggtttgctcccaggaggccaagaagtcagcctactgcccctacagtcactttcctgtgggggctgccctgctcacccaggaggggagaatcttcaaagggtgcaacatagaaaatgcctgctacccgctgggcatctgtgctgaacggaccgctatccagaaggccgtctcagaagggtacaaggatttcagggcaattgctatcgccagtgacatgcaagatgattttatctctccatgtggggcctgcaggcaagtcatgagagagtttggcaccaactggcccgtgtacatgaccaagccggatggtacgtatattggtggaggcggttcgggtggagggggatctggtggcggaggtagcggtggcgggggatcaggtggcgggggatcaggtggcgggggatcaggtggcgggggatcaggtggcgggggatcagacatccagatgacccagtctccatcttccgtgtctgcatctgtaggagacagagtcaccatcacttgtcgggcgagtcagggtattagcagctggttagcctggtatcagcagaaaccagggaaagcccctaagctcctgatctatgctgcatccagtttgcaaagtggggtcccatcaaggttcagcggcagtggatctgggacagatttcactctcaccatcagcagcctgcagcctgaagattttgcaacttattactgtcagcaaacaaatagtttcccttacacttttggcggagggaccaaggttgagatcaaaggagggggcggatcaggcggaggtggatcgggagggggtggtagcgaggtgcagctgttggagtctgggggaggcttggtacagcctggggggtccctgagactctcctgtgcagcctctggattcacctttagcagctatgtcatgatctgggtccgccaggctccagggaaggggctggagtgggtctcaagcattagtggtgacagcgtaacaacatactacgcagactccgtgaagggccggttcaccatctccagagacaattccaagaacacgctgtatctgcaaatgaacagcctgagagccgaggacacggcggtgtactactgcgccaagggccctcctacataccacacaaactactactacatggacgtatggggcaagggtacaactgtcaccgtctcctca

SEQ ID NO: 849 - DNA, 1257 bp, synthetic construct
  source 1..1257: mol_type = other DNA
cccgctgctctgctgcctgcccggggtaccaacatggcccagaagcgtcctgcctgcaccctgaagcctgagtgtgtccagcagctgctggtttgctcccaggaggccaagaagtcagcctactgcccctacagtcactttcctgtgggggctgccctgctcacccaggaggggagaatcttcaaagggtgcaacatagaaaatgcctgctacccgctgggcatctgtgctgaacggaccgctatccagaaggccgtctcagaagggtacaaggatttcagggcaattgctatcgccagtgacatgcaagatgattttatctctccatgtggggcctgcaggcaagtcatgagagagtttggcaccaactggcccgtgtacatgaccaagccggatggtacgtatattggtggaggcggttcgggtggagggggatctggtggcggaggtagcggtggcgggggatcaggtggcgggggatcaggtggcgggggatcaggtggcgggggatcaggtggcgggggatcagacatccagatgacccagtctccatcctccctgtctgcatctgtaggagacagagtcaccatcacttgccgggcaagtcagagcattagcagctatttaaattggtatcagcagaaaccagggaaagcccctaagctcctgatctatgctgcatccagtttgcaaagtggggtcccatcaaggttcagtggcagtggatctgggacagatttcactctcaccatcagcagtctgcaacctgaagattttgcaacttactactgtcagcaaagctacatcgccccttacacttttggcggagggaccaaggttgagatcaaaggagggggcggatcaggcggaggtggatcgggagggggtggtagcgaggtgcagctggtggagtctgggggaggcttggtccagcctggagggtccctgagactctcctgtgcagcctctggattcaccttcagtgaccactacatggactgggtccgccaggctccagggaaggggctggagtgggttggccgtactagaaacaaagctagtagttacaccacagaatacgccgcgtctgtgaaaggcagattcaccatctcaagagatgattcaaagaactcactgtatctgcaaatgaacagcctgaaaaccgaggacacggcggtgtactactgcgccagagagcctaaatactggatcgacttcgacctatgggggagaggtaccttggtcaccgtctcctca

SEQ ID NO: 850 - DNA, 1230 bp, synthetic construct
  source 1..1230: mol_type = other DNA
cccgctgctctgctgcctgcccggggtaccaacatggcccagaagcgtcctgcctgcaccctgaagcctgagtgtgtccagcagctgctggtttgctcccaggaggccaagaagtcagcctactgcccctacagtcactttcctgtgggggctgccctgctcacccaggaggggagaatcttcaaagggtgcaacatagaaaatgcctgctacccgctgggcatctgtgctgaacggaccgctatccagaaggccgtctcagaagggtacaaggatttcagggcaattgctatcgccagtgacatgcaagatgattttatctctccatgtggggcctgcaggcaagtcatgagagagtttggcaccaactggcccgtgtacatgaccaagccggatggtacgtatattggtggaggcggttcgggtggagggggatctggtggcggaggtagcggtggcgggggatcaggtggcgggggatcaggtggcgggggatcaggtggcgggggatcaggtggcgggggatcagacatccagatgacccagtctccatcctccctgtctgcatctgtaggagacagagtcaccatcacttgccgggcaagtcagagcattagcagctatttaaattggtatcagcagaaaccagggaaagcccctaagctcctgatctatgctgcatccagtttgcaaagtggggtcccatcaaggttcagtggcagtggatctgggacagatttcactctcaccatcagcagtctgcaacctgaagattttgcaacttactactgtcagcaaagctacatcgccccttacacttttggcggagggaccaaggttgagatcaaaggagggggcggatcaggcggaggtggatcgggagggggtggtagcgaggtgcagctggtggagtctgggggaggcttggtacagccagggcggtccctgagactctcctgtacagcttctggattcaccttcagtgaccacgacatgaactgggtccgccaggctccagggaaggggctggagtgggttggccgtactagaaacgccgctggaagttacaccacagaatacgccgcgtctgtgaaaggcagattcaccatctcaagagatgattcaaagaactcactgtatctgcaaatgaacagcctgaaaaccgaggacacggcggtgtactactgcgccagagagcctaaatactggatcgacttcgacctatggggg

SEQ ID NO: 851 - DNA, 1257 bp, synthetic construct
  source 1..1257: mol_type = other DNA
cccgctgctctgctgcctgcccggggtaccaacatggcccagaagcgtcctgcctgcaccctgaagcctgagtgtgtccagcagctgctggtttgctcccaggaggccaagaagtcagcctactgcccctacagtcactttcctgtgggggctgccctgctcacccaggaggggagaatcttcaaagggtgcaacatagaaaatgcctgctacccgctgggcatctgtgctgaacggaccgctatccagaaggccgtctcagaagggtacaaggatttcagggcaattgctatcgccagtgacatgcaagatgattttatctctccatgtggggcctgcaggcaagtcatgagagagtttggcaccaactggcccgtgtacatgaccaagccggatggtacgtatattggtggaggcggttcgggtggagggggatctggtggcggaggtagcggtggcgggggatcaggtggcgggggatcaggtggcgggggatcaggtggcgggggatcaggtggcgggggatcagaggtgcagctggtggagtctgggggaggcttggtccagcctggagggtccctgagactctcctgtgcagcctctggattcaccttcgtagaccacgacatggactgggtccgccaggctccagggaaggggctggagtgggttggccgtactagaaacaaactaggaagttacaccacagaatacgccgcgtctgtgaaaggcagattcaccatctcaagagatgattcaaagaactcactgtatctgcaaatgaacagcctgaaaaccgaggacacggcggtgtactactgcgccagagagcctaaatactggatcgacttcgacctatgggggagaggtaccttggtcaccgtctcctcaggagggggcggatcaggcggaggtggatcgggagggggtggtagcgacatccagatgacccagtctccatcctccctgtctgcatctgtaggagacagagtcaccatcacttgccgggcaagtcagagcattagcagctatttaaattggtatcagcagaaaccagggaaagcccctaagctcctgatctatgctgcatccagtttgcaaagtggggtcccatcaaggttcagtggcagtggatgcggtacagatttcactctcaccatcagcagtctgcaacctgaagattttgcaacttactactgtcagcaaagctacatcgccccttacacttttggcggagggaccaaggttgagatcaaa

SEQ ID NO: 852 - DNA, 1278 bp, synthetic construct
  source 1..1278: mol_type = other DNA
cccgctgctctgctgcctgcccggggtaccaacatggcccagaagcgtcctgcctgcaccctgaagcctgagtgtgtccagcagctgctggtttgctcccaggaggccaagaagtcagcctactgcccctacagtcactttcctgtgggggctgccctgctcacccaggaggggagaatcttcaaagggtgcaacatagaaaatgcctgctacccgctgggcatctgtgctgaacggaccgctatccagaaggccgtctcagaagggtacaaggatttcagggcaattgctatcgccagtgacatgcaagatgattttatctctccatgtggggcctgcaggcaagtcatgagagagtttggcaccaactggcccgtgtacatgaccaagccggatggtacgtatattggtggaggcggttcgggtggagggggatctggtggcggaggtagcggtggcgggggatcaggtggcgggggatcaggtggcgggggatcaggtggcgggggatcaggtggcgggggatcaggtggcgggggatcagacatccagatgacccagtctccatcttccgtgtctgcatctgtaggagacagagtcaccatcacttgtcgggcgagtcagggtattagcagctggttagcctggtatcagcagaaaccagggaaagcccctaagctcctgatctatgctgcatccagtttgcaaagtggggtcccatcaaggttcagcggcagtggatctgggacagatttcactctcaccatcagcagcctgcagcctgaagattttgcaacttattactgtcagcaaacaaatagtttcccttacacttttggcggagggaccaaggttgagatcaaaggagggggcggatcaggcggaggtggatcgggagggggtggtagcgaggtgcagctgttggagtctgggggaggcttggtacagcctggggggtccctgagactctcctgtgcagcctctggattcacctttagcaattatgccatgagctgggtccgccaggctccagggaaggggctggagtgggtctcagctattagtggtagtggtggtagcacatactacgcagactccgtgaagggccggttcaccatctccagagacaattccaagaacacgctgtatctgcaaatgaacagcctgagagccgaggacacggcggtgtactactgcgccaagggccctcctacataccacacaaactactactacatggacgtatggggcaagggtacaactgtcaccgtctcctca

SEQ ID NO: 853 - DNA, 1278 bp, synthetic construct
  source 1..1278: mol_type = other DNA
cccgctgctctgctgcctgcccggggtaccaacatggcccagaagcgtcctgcctgcaccctgaagcctgagtgtgtccagcagctgctggtttgctcccaggaggccaagaagtcagcctactgcccctacagtcactttcctgtgggggctgccctgctcacccaggaggggagaatcttcaaagggtgcaacatagaaaatgcctgctacccgctgggcatctgtgctgaacggaccgctatccagaaggccgtctcagaagggtacaaggatttcagggcaattgctatcgccagtgacatgcaagatgattttatctctccatgtggggcctgcaggcaagtcatgagagagtttggcaccaactggcccgtgtacatgaccaagccggatggtacgtatattggtggaggcggttcgggtggagggggatctggtggcggaggtagcggtggcgggggatcaggtggcgggggatcaggtggcgggggatcaggtggcgggggatcaggtggcgggggatcaggtggcgggggatcagacatccagatgacccagtctccatcttccgtgtctgcatctgtaggagacagagtcaccatcacttgtcgggcgagtcagggtattagcagctggttagcctggtatcagcagaaaccagggaaagcccctaagctcctgatctatgctgcatccagtttgcaaagtggggtcccatcaaggttcagcggcagtggatctgggacagatttcactctcaccatcagcagcctgcagcctgaagattttgcaacttattactgtcagcaaacaaatagtttcccttacacttttggcggagggaccaaggttgagatcaaaggagggggcggatcaggcggaggtggatcgggagggggtggtagcgaggtgcagctgttggagtctgggggaggcttggtacagcctggggggtccctgagactctcctgtgcagcctctggattcacctttagcagctatgtcatgatctgggtccgccaggctccagggaaggggctggagtgggtctcaagcattagtggtgacagcgtaacaacatactacgcagactccgtgaagggccggttcaccatctccagagacaattccaagaacacgctgtatctgcaaatgaacagcctgagagccgaggacacggcggtgtactactgcgccaagggccctcctacataccacacaaactactactacatggacgtatggggcaagggtacaactgtcaccgtctcctca

SEQ ID NO: 854 - DNA, 1272 bp, synthetic construct
  source 1..1272: mol_type = other DNA
cccgctgctctgctgcctgcccggggtaccaacatggcccagaagcgtcctgcctgcaccctgaagcctgagtgtgtccagcagctgctggtttgctcccaggaggccaagaagtcagcctactgcccctacagtcactttcctgtgggggctgccctgctcacccaggaggggagaatcttcaaagggtgcaacatagaaaatgcctgctacccgctgggcatctgtgctgaacggaccgctatccagaaggccgtctcagaagggtacaaggatttcagggcaattgctatcgccagtgacatgcaagatgattttatctctccatgtggggcctgcaggcaagtcatgagagagtttggcaccaactggcccgtgtacatgaccaagccggatggtacgtatattggtggaggcggttcgggtggagggggatctggtggcggaggtagcggtggcgggggatcaggtggcgggggatcaggtggcgggggatcaggtggcgggggatcaggtggcgggggatcaggtggcgggggatcagacatccagatgacccagtctccatcctccctgtctgcatctgtaggagacagagtcaccatcacttgccgggcaagtcagagcattagcagctatttaaattggtatcagcagaaaccagggaaagcccctaagctcctgatctatgctgcatccagtttgcaaagtggggtcccatcaaggttcagtggcagtggatctgggacagatttcactctcaccatcagcagtctgcaacctgaagattttgcaacttactactgtcagcaaagctacatcgccccttacacttttggcggagggaccaaggttgagatcaaaggagggggcggatcaggcggaggtggatcgggagggggtggtagcgaggtgcagctggtggagtctgggggaggcttggtccagcctggagggtccctgagactctcctgtgcagcctctggattcaccttcagtgaccactacatggactgggtccgccaggctccagggaaggggctggagtgggttggccgtactagaaacaaagctagtagttacaccacagaatacgccgcgtctgtgaaaggcagattcaccatctcaagagatgattcaaagaactcactgtatctgcaaatgaacagcctgaaaaccgaggacacggcggtgtactactgcgccagagagcctaaatactggatcgacttcgacctatgggggagaggtaccttggtcaccgtctcctca

SEQ ID NO: 855 - DNA, 1245 bp, synthetic construct
  source 1..1245: mol_type = other DNA
cccgctgctctgctgcctgcccggggtaccaacatggcccagaagcgtcctgcctgcaccctgaagcctgagtgtgtccagcagctgctggtttgctcccaggaggccaagaagtcagcctactgcccctacagtcactttcctgtgggggctgccctgctcacccaggaggggagaatcttcaaagggtgcaacatagaaaatgcctgctacccgctgggcatctgtgctgaacggaccgctatccagaaggccgtctcagaagggtacaaggatttcagggcaattgctatcgccagtgacatgcaagatgattttatctctccatgtggggcctgcaggcaagtcatgagagagtttggcaccaactggcccgtgtacatgaccaagccggatggtacgtatattggtggaggcggttcgggtggagggggatctggtggcggaggtagcggtggcgggggatcaggtggcgggggatcaggtggcgggggatcaggtggcgggggatcaggtggcgggggatcaggtggcgggggatcagacatccagatgacccagtctccatcctccctgtctgcatctgtaggagacagagtcaccatcacttgccgggcaagtcagagcattagcagctatttaaattggtatcagcagaaaccagggaaagcccctaagctcctgatctatgctgcatccagtttgcaaagtggggtcccatcaaggttcagtggcagtggatctgggacagatttcactctcaccatcagcagtctgcaacctgaagattttgcaacttactactgtcagcaaagctacatcgccccttacacttttggcggagggaccaaggttgagatcaaaggagggggcggatcaggcggaggtggatcgggagggggtggtagcgaggtgcagctggtggagtctgggggaggcttggtacagccagggcggtccctgagactctcctgtacagcttctggattcaccttcagtgaccacgacatgaactgggtccgccaggctccagggaaggggctggagtgggttggccgtactagaaacgccgctggaagttacaccacagaatacgccgcgtctgtgaaaggcagattcaccatctcaagagatgattcaaagaactcactgtatctgcaaatgaacagcctgaaaaccgaggacacggcggtgtactactgcgccagagagcctaaatactggatcgacttcgacctatggggg

SEQ ID NO: 856 - DNA, 1272 bp, synthetic construct
  source 1..1272: mol_type = other DNA
cccgctgctctgctgcctgcccggggtaccaacatggcccagaagcgtcctgcctgcaccctgaagcctgagtgtgtccagcagctgctggtttgctcccaggaggccaagaagtcagcctactgcccctacagtcactttcctgtgggggctgccctgctcacccaggaggggagaatcttcaaagggtgcaacatagaaaatgcctgctacccgctgggcatctgtgctgaacggaccgctatccagaaggccgtctcagaagggtacaaggatttcagggcaattgctatcgccagtgacatgcaagatgattttatctctccatgtggggcctgcaggcaagtcatgagagagtttggcaccaactggcccgtgtacatgaccaagccggatggtacgtatattggtggaggcggttcgggtggagggggatctggtggcggaggtagcggtggcgggggatcaggtggcgggggatcaggtggcgggggatcaggtggcgggggatcaggtggcgggggatcaggtggcgggggatcagaggtgcagctggtggagtctgggggaggcttggtccagcctggagggtccctgagactctcctgtgcagcctctggattcaccttcgtagaccacgacatggactgggtccgccaggctccagggaaggggctggagtgggttggccgtactagaaacaaactaggaagttacaccacagaatacgccgcgtctgtgaaaggcagattcaccatctcaagagatgattcaaagaactcactgtatctgcaaatgaacagcctgaaaaccgaggacacggcggtgtactactgcgccagagagcctaaatactggatcgacttcgacctatgggggagaggtaccttggtcaccgtctcctcaggagggggcggatcaggcggaggtggatcgggagggggtggtagcgacatccagatgacccagtctccatcctccctgtctgcatctgtaggagacagagtcaccatcacttgccgggcaagtcagagcattagcagctatttaaattggtatcagcagaaaccagggaaagcccctaagctcctgatctatgctgcatccagtttgcaaagtggggtcccatcaaggttcagtggcagtggatgcggtacagatttcactctcaccatcagcagtctgcaacctgaagattttgcaacttactactgtcagcaaagctacatcgccccttacacttttggcggagggaccaaggttgagatcaaa

SEQ ID NO: 857 - DNA, 1293 bp, synthetic construct
  source 1..1293: mol_type = other DNA
cccgctgctctgctgcctgcccggggtaccaacatggcccagaagcgtcctgcctgcaccctgaagcctgagtgtgtccagcagctgctggtttgctcccaggaggccaagaagtcagcctactgcccctacagtcactttcctgtgggggctgccctgctcacccaggaggggagaatcttcaaagggtgcaacatagaaaatgcctgctacccgctgggcatctgtgctgaacggaccgctatccagaaggccgtctcagaagggtacaaggatttcagggcaattgctatcgccagtgacatgcaagatgattttatctctccatgtggggcctgcaggcaagtcatgagagagtttggcaccaactggcccgtgtacatgaccaagccggatggtacgtatattggtggaggcggttcgggtggagggggatctggtggcggaggtagcggtggcgggggatcaggtggcgggggatcaggtggcgggggatcaggtggcgggggatcaggtggcgggggatcaggtggcgggggatcaggtggcgggggatcagacatccagatgacccagtctccatcttccgtgtctgcatctgtaggagacagagtcaccatcacttgtcgggcgagtcagggtattagcagctggttagcctggtatcagcagaaaccagggaaagcccctaagctcctgatctatgctgcatccagtttgcaaagtggggtcccatcaaggttcagcggcagtggatctgggacagatttcactctcaccatcagcagcctgcagcctgaagattttgcaacttattactgtcagcaaacaaatagtttcccttacacttttggcggagggaccaaggttgagatcaaaggagggggcggatcaggcggaggtggatcgggagggggtggtagcgaggtgcagctgttggagtctgggggaggcttggtacagcctggggggtccctgagactctcctgtgcagcctctggattcacctttagcaattatgccatgagctgggtccgccaggctccagggaaggggctggagtgggtctcagctattagtggtagtggtggtagcacatactacgcagactccgtgaagggccggttcaccatctccagagacaattccaagaacacgctgtatctgcaaatgaacagcctgagagccgaggacacggcggtgtactactgcgccaagggccctcctacataccacacaaactactactacatggacgtatggggcaagggtacaactgtcaccgtctcctca

SEQ ID NO: 858 - DNA, 1293 bp, synthetic construct
  source 1..1293: mol_type = other DNA
cccgctgctctgctgcctgcccggggtaccaacatggcccagaagcgtcctgcctgcaccctgaagcctgagtgtgtccagcagctgctggtttgctcccaggaggccaagaagtcagcctactgcccctacagtcactttcctgtgggggctgccctgctcacccaggaggggagaatcttcaaagggtgcaacatagaaaatgcctgctacccgctgggcatctgtgctgaacggaccgctatccagaaggccgtctcagaagggtacaaggatttcagggcaattgctatcgccagtgacatgcaagatgattttatctctccatgtggggcctgcaggcaagtcatgagagagtttggcaccaactggcccgtgtacatgaccaagccggatggtacgtatattggtggaggcggttcgggtggagggggatctggtggcggaggtagcggtggcgggggatcaggtggcgggggatcaggtggcgggggatcaggtggcgggggatcaggtggcgggggatcaggtggcgggggatcaggtggcgggggatcagacatccagatgacccagtctccatcttccgtgtctgcatctgtaggagacagagtcaccatcacttgtcgggcgagtcagggtattagcagctggttagcctggtatcagcagaaaccagggaaagcccctaagctcctgatctatgctgcatccagtttgcaaagtggggtcccatcaaggttcagcggcagtggatctgggacagatttcactctcaccatcagcagcctgcagcctgaagattttgcaacttattactgtcagcaaacaaatagtttcccttacacttttggcggagggaccaaggttgagatcaaaggagggggcggatcaggcggaggtggatcgggagggggtggtagcgaggtgcagctgttggagtctgggggaggcttggtacagcctggggggtccctgagactctcctgtgcagcctctggattcacctttagcagctatgtcatgatctgggtccgccaggctccagggaaggggctggagtgggtctcaagcattagtggtgacagcgtaacaacatactacgcagactccgtgaagggccggttcaccatctccagagacaattccaagaacacgctgtatctgcaaatgaacagcctgagagccgaggacacggcggtgtactactgcgccaagggccctcctacataccacacaaactactactacatggacgtatggggcaagggtacaactgtcaccgtctcctca

SEQ ID NO: 859 - DNA, 1287 bp, synthetic construct
  source 1..1287: mol_type = other DNA
cccgctgctctgctgcctgcccggggtaccaacatggcccagaagcgtcctgcctgcaccctgaagcctgagtgtgtccagcagctgctggtttgctcccaggaggccaagaagtcagcctactgcccctacagtcactttcctgtgggggctgccctgctcacccaggaggggagaatcttcaaagggtgcaacatagaaaatgcctgctacccgctgggcatctgtgctgaacggaccgctatccagaaggccgtctcagaagggtacaaggatttcagggcaattgctatcgccagtgacatgcaagatgattttatctctccatgtggggcctgcaggcaagtcatgagagagtttggcaccaactggcccgtgtacatgaccaagccggatggtacgtatattggtggaggcggttcgggtggagggggatctggtggcggaggtagcggtggcgggggatcaggtggcgggggatcaggtggcgggggatcaggtggcgggggatcaggtggcgggggatcaggtggcgggggatcaggtggcgggggatcagacatccagatgacccagtctccatcctccctgtctgcatctgtaggagacagagtcaccatcacttgccgggcaagtcagagcattagcagctatttaaattggtatcagcagaaaccagggaaagcccctaagctcctgatctatgctgcatccagtttgcaaagtggggtcccatcaaggttcagtggcagtggatctgggacagatttcactctcaccatcagcagtctgcaacctgaagattttgcaacttactactgtcagcaaagctacatcgccccttacacttttggcggagggaccaaggttgagatcaaaggagggggcggatcaggcggaggtggatcgggagggggtggtagcgaggtgcagctggtggagtctgggggaggcttggtccagcctggagggtccctgagactctcctgtgcagcctctggattcaccttcagtgaccactacatggactgggtccgccaggctccagggaaggggctggagtgggttggccgtactagaaacaaagctagtagttacaccacagaatacgccgcgtctgtgaaaggcagattcaccatctcaagagatgattcaaagaactcactgtatctgcaaatgaacagcctgaaaaccgaggacacggcggtgtactactgcgccagagagcctaaatactggatcgacttcgacctatgggggagaggtaccttggtcaccgtctcctca

SEQ ID NO: 860 - DNA, 1260 bp, synthetic construct
  source 1..1260: mol_type = other DNA
cccgctgctctgctgcctgcccggggtaccaacatggcccagaagcgtcctgcctgcaccctgaagcctgagtgtgtccagcagctgctggtttgctcccaggaggccaagaagtcagcctactgcccctacagtcactttcctgtgggggctgccctgctcacccaggaggggagaatcttcaaagggtgcaacatagaaaatgcctgctacccgctgggcatctgtgctgaacggaccgctatccagaaggccgtctcagaagggtacaaggatttcagggcaattgctatcgccagtgacatgcaagatgattttatctctccatgtggggcctgcaggcaagtcatgagagagtttggcaccaactggcccgtgtacatgaccaagccggatggtacgtatattggtggaggcggttcgggtggagggggatctggtggcggaggtagcggtggcgggggatcaggtggcgggggatcaggtggcgggggatcaggtggcgggggatcaggtggcgggggatcaggtggcgggggatcaggtggcgggggatcagacatccagatgacccagtctccatcctccctgtctgcatctgtaggagacagagtcaccatcacttgccgggcaagtcagagcattagcagctatttaaattggtatcagcagaaaccagggaaagcccctaagctcctgatctatgctgcatccagtttgcaaagtggggtcccatcaaggttcagtggcagtggatctgggacagatttcactctcaccatcagcagtctgcaacctgaagattttgcaacttactactgtcagcaaagctacatcgccccttacacttttggcggagggaccaaggttgagatcaaaggagggggcggatcaggcggaggtggatcgggagggggtggtagcgaggtgcagctggtggagtctgggggaggcttggtacagccagggcggtccctgagactctcctgtacagcttctggattcaccttcagtgaccacgacatgaactgggtccgccaggctccagggaaggggctggagtgggttggccgtactagaaacgccgctggaagttacaccacagaatacgccgcgtctgtgaaaggcagattcaccatctcaagagatgattcaaagaactcactgtatctgcaaatgaacagcctgaaaaccgaggacacggcggtgtactactgcgccagagagcctaaatactggatcgacttcgacctatggggg

SEQ ID NO: 861 - DNA, 1287 bp, synthetic construct
  source 1..1287: mol_type = other DNA
cccgctgctctgctgcctgcccggggtaccaacatggcccagaagcgtcctgcctgcaccctgaagcctgagtgtgtccagcagctgctggtttgctcccaggaggccaagaagtcagcctactgcccctacagtcactttcctgtgggggctgccctgctcacccaggaggggagaatcttcaaagggtgcaacatagaaaatgcctgctacccgctgggcatctgtgctgaacggaccgctatccagaaggccgtctcagaagggtacaaggatttcagggcaattgctatcgccagtgacatgcaagatgattttatctctccatgtggggcctgcaggcaagtcatgagagagtttggcaccaactggcccgtgtacatgaccaagccggatggtacgtatattggtggaggcggttcgggtggagggggatctggtggcggaggtagcggtggcgggggatcaggtggcgggggatcaggtggcgggggatcaggtggcgggggatcaggtggcgggggatcaggtggcgggggatcaggtggcgggggatcagaggtgcagctggtggagtctgggggaggcttggtccagcctggagggtccctgagactctcctgtgcagcctctggattcaccttcgtagaccacgacatggactgggtccgccaggctccagggaaggggctggagtgggttggccgtactagaaacaaactaggaagttacaccacagaatacgccgcgtctgtgaaaggcagattcaccatctcaagagatgattcaaagaactcactgtatctgcaaatgaacagcctgaaaaccgaggacacggcggtgtactactgcgccagagagcctaaatactggatcgacttcgacctatgggggagaggtaccttggtcaccgtctcctcaggagggggcggatcaggcggaggtggatcgggagggggtggtagcgacatccagatgacccagtctccatcctccctgtctgcatctgtaggagacagagtcaccatcacttgccgggcaagtcagagcattagcagctatttaaattggtatcagcagaaaccagggaaagcccctaagctcctgatctatgctgcatccagtttgcaaagtggggtcccatcaaggttcagtggcagtggatgcggtacagatttcactctcaccatcagcagtctgcaacctgaagattttgcaacttactactgtcagcaaagctacatcgccccttacacttttggcggagggaccaaggttgagatcaaa

SEQ ID NO: 862 - DNA, 1308 bp, synthetic construct
  source 1..1308: mol_type = other DNA
cccgctgctctgctgcctgcccggggtaccaacatggcccagaagcgtcctgcctgcaccctgaagcctgagtgtgtccagcagctgctggtttgctcccaggaggccaagaagtcagcctactgcccctacagtcactttcctgtgggggctgccctgctcacccaggaggggagaatcttcaaagggtgcaacatagaaaatgcctgctacccgctgggcatctgtgctgaacggaccgctatccagaaggccgtctcagaagggtacaaggatttcagggcaattgctatcgccagtgacatgcaagatgattttatctctccatgtggggcctgcaggcaagtcatgagagagtttggcaccaactggcccgtgtacatgaccaagccggatggtacgtatattggtggaggcggttcgggtggagggggatctggtggcggaggtagcggtggcgggggatcaggtggcgggggatcaggtggcgggggatcaggtggcgggggatcaggtggcgggggatcaggtggcgggggatcaggtggcgggggatcaggtggcgggggatcagacatccagatgacccagtctccatcttccgtgtctgcatctgtaggagacagagtcaccatcacttgtcgggcgagtcagggtattagcagctggttagcctggtatcagcagaaaccagggaaagcccctaagctcctgatctatgctgcatccagtttgcaaagtggggtcccatcaaggttcagcggcagtggatctgggacagatttcactctcaccatcagcagcctgcagcctgaagattttgcaacttattactgtcagcaaacaaatagtttcccttacacttttggcggagggaccaaggttgagatcaaaggagggggcggatcaggcggaggtggatcgggagggggtggtagcgaggtgcagctgttggagtctgggggaggcttggtacagcctggggggtccctgagactctcctgtgcagcctctggattcacctttagcaattatgccatgagctgggtccgccaggctccagggaaggggctggagtgggtctcagctattagtggtagtggtggtagcacatactacgcagactccgtgaagggccggttcaccatctccagagacaattccaagaacacgctgtatctgcaaatgaacagcctgagagccgaggacacggcggtgtactactgcgccaagggccctcctacataccacacaaactactactacatggacgtatggggcaagggtacaactgtcaccgtctcctca

SEQ ID NO: 863 - DNA, 1308 bp, synthetic construct
  source 1..1308: mol_type = other DNA
cccgctgctctgctgcctgcccggggtaccaacatggcccagaagcgtcctgcctgcaccctgaagcctgagtgtgtccagcagctgctggtttgctcccaggaggccaagaagtcagcctactgcccctacagtcactttcctgtgggggctgccctgctcacccaggaggggagaatcttcaaagggtgcaacatagaaaatgcctgctacccgctgggcatctgtgctgaacggaccgctatccagaaggccgtctcagaagggtacaaggatttcagggcaattgctatcgccagtgacatgcaagatgattttatctctccatgtggggcctgcaggcaagtcatgagagagtttggcaccaactggcccgtgtacatgaccaagccggatggtacgtatattggtggaggcggttcgggtggagggggatctggtggcggaggtagcggtggcgggggatcaggtggcgggggatcaggtggcgggggatcaggtggcgggggatcaggtggcgggggatcaggtggcgggggatcaggtggcgggggatcaggtggcgggggatcagacatccagatgacccagtctccatcttccgtgtctgcatctgtaggagacagagtcaccatcacttgtcgggcgagtcagggtattagcagctggttagcctggtatcagcagaaaccagggaaagcccctaagctcctgatctatgctgcatccagtttgcaaagtggggtcccatcaaggttcagcggcagtggatctgggacagatttcactctcaccatcagcagcctgcagcctgaagattttgcaacttattactgtcagcaaacaaatagtttcccttacacttttggcggagggaccaaggttgagatcaaaggagggggcggatcaggcggaggtggatcgggagggggtggtagcgaggtgcagctgttggagtctgggggaggcttggtacagcctggggggtccctgagactctcctgtgcagcctctggattcacctttagcagctatgtcatgatctgggtccgccaggctccagggaaggggctggagtgggtctcaagcattagtggtgacagcgtaacaacatactacgcagactccgtgaagggccggttcaccatctccagagacaattccaagaacacgctgtatctgcaaatgaacagcctgagagccgaggacacggcggtgtactactgcgccaagggccctcctacataccacacaaactactactacatggacgtatggggcaagggtacaactgtcaccgtctcctca

SEQ ID NO: 864 - DNA, 1302 bp, synthetic construct
  source 1..1302: mol_type = other DNA
cccgctgctctgctgcctgcccggggtaccaacatggcccagaagcgtcctgcctgcaccctgaagcctgagtgtgtccagcagctgctggtttgctcccaggaggccaagaagtcagcctactgcccctacagtcactttcctgtgggggctgccctgctcacccaggaggggagaatcttcaaagggtgcaacatagaaaatgcctgctacccgctgggcatctgtgctgaacggaccgctatccagaaggccgtctcagaagggtacaaggatttcagggcaattgctatcgccagtgacatgcaagatgattttatctctccatgtggggcctgcaggcaagtcatgagagagtttggcaccaactggcccgtgtacatgaccaagccggatggtacgtatattggtggaggcggttcgggtggagggggatctggtggcggaggtagcggtggcgggggatcaggtggcgggggatcaggtggcgggggatcaggtggcgggggatcaggtggcgggggatcaggtggcgggggatcaggtggcgggggatcaggtggcgggggatcagacatccagatgacccagtctccatcctccctgtctgcatctgtaggagacagagtcaccatcacttgccgggcaagtcagagcattagcagctatttaaattggtatcagcagaaaccagggaaagcccctaagctcctgatctatgctgcatccagtttgcaaagtggggtcccatcaaggttcagtggcagtggatctgggacagatttcactctcaccatcagcagtctgcaacctgaagattttgcaacttactactgtcagcaaagctacatcgccccttacacttttggcggagggaccaaggttgagatcaaaggagggggcggatcaggcggaggtggatcgggagggggtggtagcgaggtgcagctggtggagtctgggggaggcttggtccagcctggagggtccctgagactctcctgtgcagcctctggattcaccttcagtgaccactacatggactgggtccgccaggctccagggaaggggctggagtgggttggccgtactagaaacaaagctagtagttacaccacagaatacgccgcgtctgtgaaaggcagattcaccatctcaagagatgattcaaagaactcactgtatctgcaaatgaacagcctgaaaaccgaggacacggcggtgtactactgcgccagagagcctaaatactggatcgacttcgacctatgggggagaggtaccttggtcaccgtctcctca

SEQ ID NO: 865 - DNA, 1275 bp, synthetic construct
  source 1..1275: mol_type = other DNA
cccgctgctctgctgcctgcccggggtaccaacatggcccagaagcgtcctgcctgcaccctgaagcctgagtgtgtccagcagctgctggtttgctcccaggaggccaagaagtcagcctactgcccctacagtcactttcctgtgggggctgccctgctcacccaggaggggagaatcttcaaagggtgcaacatagaaaatgcctgctacccgctgggcatctgtgctgaacggaccgctatccagaaggccgtctcagaagggtacaaggatttcagggcaattgctatcgccagtgacatgcaagatgattttatctctccatgtggggcctgcaggcaagtcatgagagagtttggcaccaactggcccgtgtacatgaccaagccggatggtacgtatattggtggaggcggttcgggtggagggggatctggtggcggaggtagcggtggcgggggatcaggtggcgggggatcaggtggcgggggatcaggtggcgggggatcaggtggcgggggatcaggtggcgggggatcaggtggcgggggatcaggtggcgggggatcagacatccagatgacccagtctccatcctccctgtctgcatctgtaggagacagagtcaccatcacttgccgggcaagtcagagcattagcagctatttaaattggtatcagcagaaaccagggaaagcccctaagctcctgatctatgctgcatccagtttgcaaagtggggtcccatcaaggttcagtggcagtggatctgggacagatttcactctcaccatcagcagtctgcaacctgaagattttgcaacttactactgtcagcaaagctacatcgccccttacacttttggcggagggaccaaggttgagatcaaaggagggggcggatcaggcggaggtggatcgggagggggtggtagcgaggtgcagctggtggagtctgggggaggcttggtacagccagggcggtccctgagactctcctgtacagcttctggattcaccttcagtgaccacgacatgaactgggtccgccaggctccagggaaggggctggagtgggttggccgtactagaaacgccgctggaagttacaccacagaatacgccgcgtctgtgaaaggcagattcaccatctcaagagatgattcaaagaactcactgtatctgcaaatgaacagcctgaaaaccgaggacacggcggtgtactactgcgccagagagcctaaatactggatcgacttcgacctatggggg

SEQ ID NO: 866 - DNA, 1302 bp, synthetic construct
  source 1..1302: mol_type = other DNA
cccgctgctctgctgcctgcccggggtaccaacatggcccagaagcgtcctgcctgcaccctgaagcctgagtgtgtccagcagctgctggtttgctcccaggaggccaagaagtcagcctactgcccctacagtcactttcctgtgggggctgccctgctcacccaggaggggagaatcttcaaagggtgcaacatagaaaatgcctgctacccgctgggcatctgtgctgaacggaccgctatccagaaggccgtctcagaagggtacaaggatttcagggcaattgctatcgccagtgacatgcaagatgattttatctctccatgtggggcctgcaggcaagtcatgagagagtttggcaccaactggcccgtgtacatgaccaagccggatggtacgtatattggtggaggcggttcgggtggagggggatctggtggcggaggtagcggtggcgggggatcaggtggcgggggatcaggtggcgggggatcaggtggcgggggatcaggtggcgggggatcaggtggcgggggatcaggtggcgggggatcaggtggcgggggatcagaggtgcagctggtggagtctgggggaggcttggtccagcctggagggtccctgagactctcctgtgcagcctctggattcaccttcgtagaccacgacatggactgggtccgccaggctccagggaaggggctggagtgggttggccgtactagaaacaaactaggaagttacaccacagaatacgccgcgtctgtgaaaggcagattcaccatctcaagagatgattcaaagaactcactgtatctgcaaatgaacagcctgaaaaccgaggacacggcggtgtactactgcgccagagagcctaaatactggatcgacttcgacctatgggggagaggtaccttggtcaccgtctcctcaggagggggcggatcaggcggaggtggatcgggagggggtggtagcgacatccagatgacccagtctccatcctccctgtctgcatctgtaggagacagagtcaccatcacttgccgggcaagtcagagcattagcagctatttaaattggtatcagcagaaaccagggaaagcccctaagctcctgatctatgctgcatccagtttgcaaagtggggtcccatcaaggttcagtggcagtggatgcggtacagatttcactctcaccatcagcagtctgcaacctgaagattttgcaacttactactgtcagcaaagctacatcgccccttacacttttggcggagggaccaaggttgagatcaaa

SEQ ID NO: 867 - DNA, 1323 bp, synthetic construct
  source 1..1323: mol_type = other DNA
cccgctgctctgctgcctgcccggggtaccaacatggcccagaagcgtcctgcctgcaccctgaagcctgagtgtgtccagcagctgctggtttgctcccaggaggccaagaagtcagcctactgcccctacagtcactttcctgtgggggctgccctgctcacccaggaggggagaatcttcaaagggtgcaacatagaaaatgcctgctacccgctgggcatctgtgctgaacggaccgctatccagaaggccgtctcagaagggtacaaggatttcagggcaattgctatcgccagtgacatgcaagatgattttatctctccatgtggggcctgcaggcaagtcatgagagagtttggcaccaactggcccgtgtacatgaccaagccggatggtacgtatattggtggaggcggttcgggtggagggggatctggtggcggaggtagcggtggcgggggatcaggtggcgggggatcaggtggcgggggatcaggtggcgggggatcaggtggcgggggatcaggtggcgggggatcaggtggcgggggatcaggtggcgggggatcaggtggcgggggatcagacatccagatgacccagtctccatcttccgtgtctgcatctgtaggagacagagtcaccatcacttgtcgggcgagtcagggtattagcagctggttagcctggtatcagcagaaaccagggaaagcccctaagctcctgatctatgctgcatccagtttgcaaagtggggtcccatcaaggttcagcggcagtggatctgggacagatttcactctcaccatcagcagcctgcagcctgaagattttgcaacttattactgtcagcaaacaaatagtttcccttacacttttggcggagggaccaaggttgagatcaaaggagggggcggatcaggcggaggtggatcgggagggggtggtagcgaggtgcagctgttggagtctgggggaggcttggtacagcctggggggtccctgagactctcctgtgcagcctctggattcacctttagcaattatgccatgagctgggtccgccaggctccagggaaggggctggagtgggtctcagctattagtggtagtggtggtagcacatactacgcagactccgtgaagggccggttcaccatctccagagacaattccaagaacacgctgtatctgcaaatgaacagcctgagagccgaggacacggcggtgtactactgcgccaagggccctcctacataccacacaaactactactacatggacgtatggggcaagggtacaactgtcaccgtctcctca

SEQ ID NO: 868 - DNA, 1323 bp, synthetic construct
  source 1..1323: mol_type = other DNA
cccgctgctctgctgcctgcccggggtaccaacatggcccagaagcgtcctgcctgcaccctgaagcctgagtgtgtccagcagctgctggtttgctcccaggaggccaagaagtcagcctactgcccctacagtcactttcctgtgggggctgccctgctcacccaggaggggagaatcttcaaagggtgcaacatagaaaatgcctgctacccgctgggcatctgtgctgaacggaccgctatccagaaggccgtctcagaagggtacaaggatttcagggcaattgctatcgccagtgacatgcaagatgattttatctctccatgtggggcctgcaggcaagtcatgagagagtttggcaccaactggcccgtgtacatgaccaagccggatggtacgtatattggtggaggcggttcgggtggagggggatctggtggcggaggtagcggtggcgggggatcaggtggcgggggatcaggtggcgggggatcaggtggcgggggatcaggtggcgggggatcaggtggcgggggatcaggtggcgggggatcaggtggcgggggatcaggtggcgggggatcagacatccagatgacccagtctccatcttccgtgtctgcatctgtaggagacagagtcaccatcacttgtcgggcgagtcagggtattagcagctggttagcctggtatcagcagaaaccagggaaagcccctaagctcctgatctatgctgcatccagtttgcaaagtggggtcccatcaaggttcagcggcagtggatctgggacagatttcactctcaccatcagcagcctgcagcctgaagattttgcaacttattactgtcagcaaacaaatagtttcccttacacttttggcggagggaccaaggttgagatcaaaggagggggcggatcaggcggaggtggatcgggagggggtggtagcgaggtgcagctgttggagtctgggggaggcttggtacagcctggggggtccctgagactctcctgtgcagcctctggattcacctttagcagctatgtcatgatctgggtccgccaggctccagggaaggggctggagtgggtctcaagcattagtggtgacagcgtaacaacatactacgcagactccgtgaagggccggttcaccatctccagagacaattccaagaacacgctgtatctgcaaatgaacagcctgagagccgaggacacggcggtgtactactgcgccaagggccctcctacataccacacaaactactactacatggacgtatggggcaagggtacaactgtcaccgtctcctca

SEQ ID NO: 869 - DNA, 1317 bp, synthetic construct
  source 1..1317: mol_type = other DNA
cccgctgctctgctgcctgcccggggtaccaacatggcccagaagcgtcctgcctgcaccctgaagcctgagtgtgtccagcagctgctggtttgctcccaggaggccaagaagtcagcctactgcccctacagtcactttcctgtgggggctgccctgctcacccaggaggggagaatcttcaaagggtgcaacatagaaaatgcctgctacccgctgggcatctgtgctgaacggaccgctatccagaaggccgtctcagaagggtacaaggatttcagggcaattgctatcgccagtgacatgcaagatgattttatctctccatgtggggcctgcaggcaagtcatgagagagtttggcaccaactggcccgtgtacatgaccaagccggatggtacgtatattggtggaggcggttcgggtggagggggatctggtggcggaggtagcggtggcgggggatcaggtggcgggggatcaggtggcgggggatcaggtggcgggggatcaggtggcgggggatcaggtggcgggggatcaggtggcgggggatcaggtggcgggggatcaggtggcgggggatcagacatccagatgacccagtctccatcctccctgtctgcatctgtaggagacagagtcaccatcacttgccgggcaagtcagagcattagcagctatttaaattggtatcagcagaaaccagggaaagcccctaagctcctgatctatgctgcatccagtttgcaaagtggggtcccatcaaggttcagtggcagtggatctgggacagatttcactctcaccatcagcagtctgcaacctgaagattttgcaacttactactgtcagcaaagctacatcgccccttacacttttggcggagggaccaaggttgagatcaaaggagggggcggatcaggcggaggtggatcgggagggggtggtagcgaggtgcagctggtggagtctgggggaggcttggtccagcctggagggtccctgagactctcctgtgcagcctctggattcaccttcagtgaccactacatggactgggtccgccaggctccagggaaggggctggagtgggttggccgtactagaaacaaagctagtagttacaccacagaatacgccgcgtctgtgaaaggcagattcaccatctcaagagatgattcaaagaactcactgtatctgcaaatgaacagcctgaaaaccgaggacacggcggtgtactactgcgccagagagcctaaatactggatcgacttcgacctatgggggagaggtaccttggtcaccgtctcctca

SEQ ID NO: 870 - DNA, 1290 bp, synthetic construct
  source 1..1290: mol_type = other DNA
cccgctgctctgctgcctgcccggggtaccaacatggcccagaagcgtcctgcctgcaccctgaagcctgagtgtgtccagcagctgctggtttgctcccaggaggccaagaagtcagcctactgcccctacagtcactttcctgtgggggctgccctgctcacccaggaggggagaatcttcaaagggtgcaacatagaaaatgcctgctacccgctgggcatctgtgctgaacggaccgctatccagaaggccgtctcagaagggtacaaggatttcagggcaattgctatcgccagtgacatgcaagatgattttatctctccatgtggggcctgcaggcaagtcatgagagagtttggcaccaactggcccgtgtacatgaccaagccggatggtacgtatattggtggaggcggttcgggtggagggggatctggtggcggaggtagcggtggcgggggatcaggtggcgggggatcaggtggcgggggatcaggtggcgggggatcaggtggcgggggatcaggtggcgggggatcaggtggcgggggatcaggtggcgggggatcaggtggcgggggatcagacatccagatgacccagtctccatcctccctgtctgcatctgtaggagacagagtcaccatcacttgccgggcaagtcagagcattagcagctatttaaattggtatcagcagaaaccagggaaagcccctaagctcctgatctatgctgcatccagtttgcaaagtggggtcccatcaaggttcagtggcagtggatctgggacagatttcactctcaccatcagcagtctgcaacctgaagattttgcaacttactactgtcagcaaagctacatcgccccttacacttttggcggagggaccaaggttgagatcaaaggagggggcggatcaggcggaggtggatcgggagggggtggtagcgaggtgcagctggtggagtctgggggaggcttggtacagccagggcggtccctgagactctcctgtacagcttctggattcaccttcagtgaccacgacatgaactgggtccgccaggctccagggaaggggctggagtgggttggccgtactagaaacgccgctggaagttacaccacagaatacgccgcgtctgtgaaaggcagattcaccatctcaagagatgattcaaagaactcactgtatctgcaaatgaacagcctgaaaaccgaggacacggcggtgtactactgcgccagagagcctaaatactggatcgacttcgacctatggggg

SEQ ID NO: 871 - DNA, 1317 bp, synthetic construct
  source 1..1317: mol_type = other DNA
cccgctgctctgctgcctgcccggggtaccaacatggcccagaagcgtcctgcctgcaccctgaagcctgagtgtgtccagcagctgctggtttgctcccaggaggccaagaagtcagcctactgcccctacagtcactttcctgtgggggctgccctgctcacccaggaggggagaatcttcaaagggtgcaacatagaaaatgcctgctacccgctgggcatctgtgctgaacggaccgctatccagaaggccgtctcagaagggtacaaggatttcagggcaattgctatcgccagtgacatgcaagatgattttatctctccatgtggggcctgcaggcaagtcatgagagagtttggcaccaactggcccgtgtacatgaccaagccggatggtacgtatattggtggaggcggttcgggtggagggggatctggtggcggaggtagcggtggcgggggatcaggtggcgggggatcaggtggcgggggatcaggtggcgggggatcaggtggcgggggatcaggtggcgggggatcaggtggcgggggatcaggtggcgggggatcaggtggcgggggatcagaggtgcagctggtggagtctgggggaggcttggtccagcctggagggtccctgagactctcctgtgcagcctctggattcaccttcgtagaccacgacatggactgggtccgccaggctccagggaaggggctggagtgggttggccgtactagaaacaaactaggaagttacaccacagaatacgccgcgtctgtgaaaggcagattcaccatctcaagagatgattcaaagaactcactgtatctgcaaatgaacagcctgaaaaccgaggacacggcggtgtactactgcgccagagagcctaaatactggatcgacttcgacctatgggggagaggtaccttggtcaccgtctcctcaggagggggcggatcaggcggaggtggatcgggagggggtggtagcgacatccagatgacccagtctccatcctccctgtctgcatctgtaggagacagagtcaccatcacttgccgggcaagtcagagcattagcagctatttaaattggtatcagcagaaaccagggaaagcccctaagctcctgatctatgctgcatccagtttgcaaagtggggtcccatcaaggttcagtggcagtggatgcggtacagatttcactctcaccatcagcagtctgcaacctgaagattttgcaacttactactgtcagcaaagctacatcgccccttacacttttggcggagggaccaaggttgagatcaaa

SEQ ID NO: 872 - DNA, 1158 bp, synthetic construct
  source 1..1158: mol_type = other DNA
cccgctgctctgctgcctgcccggggtaccaacatggcccagaagcgtcctgcctgcaccctgaagcctgagtgtgtccagcagctgctggtttgctcccaggaggccaagaagtcagcctactgcccctacagtcactttcctgtgggggctgccctgctcacccaggaggggagaatcttcaaagggtgcaacatagaaaatgcctgctacccgctgggcatctgtgctgaacggaccgctatccagaaggccgtctcagaagggtacaaggatttcagggcaattgctatcgccagtgacatgcaagatgattttatctctccatgtggggcctgcaggcaagtcatgagagagtttggcaccaactggcccgtgtacatgaccaagccggatggtacgtatattggtggcgggggatcagaggtgcagctgttggagtctgggggaggcttggtacagcctggggggtccctgagactctcctgtgcagcctctggattcacctttagcaattatgccatgagctgggtccgccaggctccagggaaggggctggagtgggtctcagctattagtggtagtggtggtagcacatactacgcagactccgtgaagggccggttcaccatctccagagacaattccaagaacacgctgtatctgcaaatgaacagcctgagagccgaggacacggcggtgtactactgcgccaagggccctcctacataccacacaaactactactacatggacgtatggggcaagggtacaactgtcaccgtctcctcaggagggggcggatcaggcggaggtggatcgggagggggtggtagcgacatccagatgacccagtctccatcttccgtgtctgcatctgtaggagacagagtcaccatcacttgtcgggcgagtcagggtattagcagctggttagcctggtatcagcagaaaccagggaaagcccctaagctcctgatctatgctgcatccagtttgcaaagtggggtcccatcaaggttcagcggcagtggatctgggacagatttcactctcaccatcagcagcctgcagcctgaagattttgcaacttattactgtcagcaaacaaatagtttcccttacacttttggcggagggaccaaggttgagatcaaa

SEQ ID NO: 873 - DNA, 1158 bp, synthetic construct
  source 1..1158: mol_type = other DNA
cccgctgctctgctgcctgcccggggtaccaacatggcccagaagcgtcctgcctgcaccctgaagcctgagtgtgtccagcagctgctggtttgctcccaggaggccaagaagtcagcctactgcccctacagtcactttcctgtgggggctgccctgctcacccaggaggggagaatcttcaaagggtgcaacatagaaaatgcctgctacccgctgggcatctgtgctgaacggaccgctatccagaaggccgtctcagaagggtacaaggatttcagggcaattgctatcgccagtgacatgcaagatgattttatctctccatgtggggcctgcaggcaagtcatgagagagtttggcaccaactggcccgtgtacatgaccaagccggatggtacgtatattggtggcgggggatcagaggtgcagctgttggagtctgggggaggcttggtacagcctggggggtccctgagactctcctgtgcagcctctggattcacctttagcagctatgtcatgatctgggtccgccaggctccagggaaggggctggagtgggtctcaagcattagtggtgacagcgtaacaacatactacgcagactccgtgaagggccggttcaccatctccagagacaattccaagaacacgctgtatctgcaaatgaacagcctgagagccgaggacacggcggtgtactactgcgccaagggccctcctacataccacacaaactactactacatggacgtatggggcaagggtacaactgtcaccgtctcctcaggagggggcggatcaggcggaggtggatcgggagggggtggtagcgacatccagatgacccagtctccatcttccgtgtctgcatctgtaggagacagagtcaccatcacttgtcgggcgagtcagggtattagcagctggttagcctggtatcagcagaaaccagggaaagcccctaagctcctgatctatgctgcatccagtttgcaaagtggggtcccatcaaggttcagcggcagtggatctgggacagatttcactctcaccatcagcagcctgcagcctgaagattttgcaacttattactgtcagcaaacaaatagtttcccttacacttttggcggagggaccaaggttgagatcaaa

SEQ ID NO: 874 - DNA, 1152 bp, synthetic construct
  source 1..1152: mol_type = other DNA
cccgctgctctgctgcctgcccggggtaccaacatggcccagaagcgtcctgcctgcaccctgaagcctgagtgtgtccagcagctgctggtttgctcccaggaggccaagaagtcagcctactgcccctacagtcactttcctgtgggggctgccctgctcacccaggaggggagaatcttcaaagggtgcaacatagaaaatgcctgctacccgctgggcatctgtgctgaacggaccgctatccagaaggccgtctcagaagggtacaaggatttcagggcaattgctatcgccagtgacatgcaagatgattttatctctccatgtggggcctgcaggcaagtcatgagagagtttggcaccaactggcccgtgtacatgaccaagccggatggtacgtatattggtggcgggggatcagaggtgcagctggtggagtctgggggaggcttggtccagcctggagggtccctgagactctcctgtgcagcctctggattcaccttcagtgaccactacatggactgggtccgccaggctccagggaaggggctggagtgggttggccgtactagaaacaaagctagtagttacaccacagaatacgccgcgtctgtgaaaggcagattcaccatctcaagagatgattcaaagaactcactgtatctgcaaatgaacagcctgaaaaccgaggacacggcggtgtactactgcgccagagagcctaaatactggatcgacttcgacctatgggggagaggtaccttggtcaccgtctcctcaggagggggcggatcaggcggaggtggatcgggagggggtggtagcgacatccagatgacccagtctccatcctccctgtctgcatctgtaggagacagagtcaccatcacttgccgggcaagtcagagcattagcagctatttaaattggtatcagcagaaaccagggaaagcccctaagctcctgatctatgctgcatccagtttgcaaagtggggtcccatcaaggttcagtggcagtggatctgggacagatttcactctcaccatcagcagtctgcaacctgaagattttgcaacttactactgtcagcaaagctacatcgccccttacacttttggcggagggaccaaggttgagatcaaa

SEQ ID NO: 875 - DNA, 1125 bp, synthetic construct
  source 1..1125: mol_type = other DNA
cccgctgctctgctgcctgcccggggtaccaacatggcccagaagcgtcctgcctgcaccctgaagcctgagtgtgtccagcagctgctggtttgctcccaggaggccaagaagtcagcctactgcccctacagtcactttcctgtgggggctgccctgctcacccaggaggggagaatcttcaaagggtgcaacatagaaaatgcctgctacccgctgggcatctgtgctgaacggaccgctatccagaaggccgtctcagaagggtacaaggatttcagggcaattgctatcgccagtgacatgcaagatgattttatctctccatgtggggcctgcaggcaagtcatgagagagtttggcaccaactggcccgtgtacatgaccaagccggatggtacgtatattggtggcgggggatcagaggtgcagctggtggagtctgggggaggcttggtacagccagggcggtccctgagactctcctgtacagcttctggattcaccttcagtgaccacgacatgaactgggtccgccaggctccagggaaggggctggagtgggttggccgtactagaaacgccgctggaagttacaccacagaatacgccgcgtctgtgaaaggcagattcaccatctcaagagatgattcaaagaactcactgtatctgcaaatgaacagcctgaaaaccgaggacacggcggtgtactactgcgccagagagcctaaatactggatcgacttcgacctatgggggggagggggcggatcaggcggaggtggatcgggagggggtggtagcgacatccagatgacccagtctccatcctccctgtctgcatctgtaggagacagagtcaccatcacttgccgggcaagtcagagcattagcagctatttaaattggtatcagcagaaaccagggaaagcccctaagctcctgatctatgctgcatccagtttgcaaagtggggtcccatcaaggttcagtggcagtggatctgggacagatttcactctcaccatcagcagtctgcaacctgaagattttgcaacttactactgtcagcaaagctacatcgccccttacacttttggcggagggaccaaggttgagatcaaa

SEQ ID NO: 876 - DNA, 1152 bp, synthetic construct
  source 1..1152: mol_type = other DNA
cccgctgctctgctgcctgcccggggtaccaacatggcccagaagcgtcctgcctgcaccctgaagcctgagtgtgtccagcagctgctggtttgctcccaggaggccaagaagtcagcctactgcccctacagtcactttcctgtgggggctgccctgctcacccaggaggggagaatcttcaaagggtgcaacatagaaaatgcctgctacccgctgggcatctgtgctgaacggaccgctatccagaaggccgtctcagaagggtacaaggatttcagggcaattgctatcgccagtgacatgcaagatgattttatctctccatgtggggcctgcaggcaagtcatgagagagtttggcaccaactggcccgtgtacatgaccaagccggatggtacgtatattggtggcgggggatcagacatccagatgacccagtctccatcctccctgtctgcatctgtaggagacagagtcaccatcacttgccgggcaagtcagagcattagcagctatttaaattggtatcagcagaaaccagggaaagcccctaagctcctgatctatgctgcatccagtttgcaaagtggggtcccatcaaggttcagtggcagtggatgcggtacagatttcactctcaccatcagcagtctgcaacctgaagattttgcaacttactactgtcagcaaagctacatcgccccttacacttttggcggagggaccaaggttgagatcaaaggagggggcggatcaggcggaggtggatcgggagggggtggtagcgaggtgcagctggtggagtctgggggaggcttggtccagcctggagggtccctgagactctcctgtgcagcctctggattcaccttcgtagaccacgacatggactgggtccgccaggctccagggaaggggctggagtgggttggccgtactagaaacaaactaggaagttacaccacagaatacgccgcgtctgtgaaaggcagattcaccatctcaagagatgattcaaagaactcactgtatctgcaaatgaacagcctgaaaaccgaggacacggcggtgtactactgcgccagagagcctaaatactggatcgacttcgacctatgggggagaggtaccttggtcaccgtctcctca

SEQ ID NO: 877 - DNA, 1188 bp, synthetic construct
  source 1..1188: mol_type = other DNA
cccgctgctctgctgcctgcccggggtaccaacatggcccagaagcgtcctgcctgcaccctgaagcctgagtgtgtccagcagctgctggtttgctcccaggaggccaagaagtcagcctactgcccctacagtcactttcctgtgggggctgccctgctcacccaggaggggagaatcttcaaagggtgcaacatagaaaatgcctgctacccgctgggcatctgtgctgaacggaccgctatccagaaggccgtctcagaagggtacaaggatttcagggcaattgctatcgccagtgacatgcaagatgattttatctctccatgtggggcctgcaggcaagtcatgagagagtttggcaccaactggcccgtgtacatgaccaagccggatggtacgtatattggagggggcggatcaggcggaggtggatcgggagggggtggtagcgaggtgcagctgttggagtctgggggaggcttggtacagcctggggggtccctgagactctcctgtgcagcctctggattcacctttagcaattatgccatgagctgggtccgccaggctccagggaaggggctggagtgggtctcagctattagtggtagtggtggtagcacatactacgcagactccgtgaagggccggttcaccatctccagagacaattccaagaacacgctgtatctgcaaatgaacagcctgagagccgaggacacggcggtgtactactgcgccaagggccctcctacataccacacaaactactactacatggacgtatggggcaagggtacaactgtcaccgtctcctcaggagggggcggatcaggcggaggtggatcgggagggggtggtagcgacatccagatgacccagtctccatcttccgtgtctgcatctgtaggagacagagtcaccatcacttgtcgggcgagtcagggtattagcagctggttagcctggtatcagcagaaaccagggaaagcccctaagctcctgatctatgctgcatccagtttgcaaagtggggtcccatcaaggttcagcggcagtggatctgggacagatttcactctcaccatcagcagcctgcagcctgaagattttgcaacttattactgtcagcaaacaaatagtttcccttacacttttggcggagggaccaaggttgagatcaaa

SEQ ID NO: 878 - DNA, 1188 bp, synthetic construct
  source 1..1188: mol_type = other DNA
cccgctgctctgctgcctgcccggggtaccaacatggcccagaagcgtcctgcctgcaccctgaagcctgagtgtgtccagcagctgctggtttgctcccaggaggccaagaagtcagcctactgcccctacagtcactttcctgtgggggctgccctgctcacccaggaggggagaatcttcaaagggtgcaacatagaaaatgcctgctacccgctgggcatctgtgctgaacggaccgctatccagaaggccgtctcagaagggtacaaggatttcagggcaattgctatcgccagtgacatgcaagatgattttatctctccatgtggggcctgcaggcaagtcatgagagagtttggcaccaactggcccgtgtacatgaccaagccggatggtacgtatattggagggggcggatcaggcggaggtggatcgggagggggtggtagcgaggtgcagctgttggagtctgggggaggcttggtacagcctggggggtccctgagactctcctgtgcagcctctggattcacctttagcagctatgtcatgatctgggtccgccaggctccagggaaggggctggagtgggtctcaagcattagtggtgacagcgtaacaacatactacgcagactccgtgaagggccggttcaccatctccagagacaattccaagaacacgctgtatctgcaaatgaacagcctgagagccgaggacacggcggtgtactactgcgccaagggccctcctacataccacacaaactactactacatggacgtatggggcaagggtacaactgtcaccgtctcctcaggagggggcggatcaggcggaggtggatcgggagggggtggtagcgacatccagatgacccagtctccatcttccgtgtctgcatctgtaggagacagagtcaccatcacttgtcgggcgagtcagggtattagcagctggttagcctggtatcagcagaaaccagggaaagcccctaagctcctgatctatgctgcatccagtttgcaaagtggggtcccatcaaggttcagcggcagtggatctgggacagatttcactctcaccatcagcagcctgcagcctgaagattttgcaacttattactgtcagcaaacaaatagtttcccttacacttttggcggagggaccaaggttgagatcaaa

SEQ ID NO: 879 - DNA, 1182 bp, synthetic construct
  source 1..1182: mol_type = other DNA
cccgctgctctgctgcctgcccggggtaccaacatggcccagaagcgtcctgcctgcaccctgaagcctgagtgtgtccagcagctgctggtttgctcccaggaggccaagaagtcagcctactgcccctacagtcactttcctgtgggggctgccctgctcacccaggaggggagaatcttcaaagggtgcaacatagaaaatgcctgctacccgctgggcatctgtgctgaacggaccgctatccagaaggccgtctcagaagggtacaaggatttcagggcaattgctatcgccagtgacatgcaagatgattttatctctccatgtggggcctgcaggcaagtcatgagagagtttggcaccaactggcccgtgtacatgaccaagccggatggtacgtatattggagggggcggatcaggcggaggtggatcgggagggggtggtagcgaggtgcagctggtggagtctgggggaggcttggtccagcctggagggtccctgagactctcctgtgcagcctctggattcaccttcagtgaccactacatggactgggtccgccaggctccagggaaggggctggagtgggttggccgtactagaaacaaagctagtagttacaccacagaatacgccgcgtctgtgaaaggcagattcaccatctcaagagatgattcaaagaactcactgtatctgcaaatgaacagcctgaaaaccgaggacacggcggtgtactactgcgccagagagcctaaatactggatcgacttcgacctatgggggagaggtaccttggtcaccgtctcctcaggagggggcggatcaggcggaggtggatcgggagggggtggtagcgacatccagatgacccagtctccatcctccctgtctgcatctgtaggagacagagtcaccatcacttgccgggcaagtcagagcattagcagctatttaaattggtatcagcagaaaccagggaaagcccctaagctcctgatctatgctgcatccagtttgcaaagtggggtcccatcaaggttcagtggcagtggatctgggacagatttcactctcaccatcagcagtctgcaacctgaagattttgcaacttactactgtcagcaaagctacatcgccccttacacttttggcggagggaccaaggttgagatcaaa

SEQ ID NO: 880 - DNA, 1155 bp, synthetic construct
  source 1..1155: mol_type = other DNA
cccgctgctctgctgcctgcccggggtaccaacatggcccagaagcgtcctgcctgcaccctgaagcctgagtgtgtccagcagctgctggtttgctcccaggaggccaagaagtcagcctactgcccctacagtcactttcctgtgggggctgccctgctcacccaggaggggagaatcttcaaagggtgcaacatagaaaatgcctgctacccgctgggcatctgtgctgaacggaccgctatccagaaggccgtctcagaagggtacaaggatttcagggcaattgctatcgccagtgacatgcaagatgattttatctctccatgtggggcctgcaggcaagtcatgagagagtttggcaccaactggcccgtgtacatgaccaagccggatggtacgtatattggagggggcggatcaggcggaggtggatcgggagggggtggtagcgaggtgcagctggtggagtctgggggaggcttggtacagccagggcggtccctgagactctcctgtacagcttctggattcaccttcagtgaccacgacatgaactgggtccgccaggctccagggaaggggctggagtgggttggccgtactagaaacgccgctggaagttacaccacagaatacgccgcgtctgtgaaaggcagattcaccatctcaagagatgattcaaagaactcactgtatctgcaaatgaacagcctgaaaaccgaggacacggcggtgtactactgcgccagagagcctaaatactggatcgacttcgacctatgggggggagggggcggatcaggcggaggtggatcgggagggggtggtagcgacatccagatgacccagtctccatcctccctgtctgcatctgtaggagacagagtcaccatcacttgccgggcaagtcagagcattagcagctatttaaattggtatcagcagaaaccagggaaagcccctaagctcctgatctatgctgcatccagtttgcaaagtggggtcccatcaaggttcagtggcagtggatctgggacagatttcactctcaccatcagcagtctgcaacctgaagattttgcaacttactactgtcagcaaagctacatcgccccttacacttttggcggagggaccaaggttgagatcaaa

SEQ ID NO: 881 - DNA, 1182 bp, synthetic construct
  source 1..1182: mol_type = other DNA
cccgctgctctgctgcctgcccggggtaccaacatggcccagaagcgtcctgcctgcaccctgaagcctgagtgtgtccagcagctgctggtttgctcccaggaggccaagaagtcagcctactgcccctacagtcactttcctgtgggggctgccctgctcacccaggaggggagaatcttcaaagggtgcaacatagaaaatgcctgctacccgctgggcatctgtgctgaacggaccgctatccagaaggccgtctcagaagggtacaaggatttcagggcaattgctatcgccagtgacatgcaagatgattttatctctccatgtggggcctgcaggcaagtcatgagagagtttggcaccaactggcccgtgtacatgaccaagccggatggtacgtatattggagggggcggatcaggcggaggtggatcgggagggggtggtagcgacatccagatgacccagtctccatcctccctgtctgcatctgtaggagacagagtcaccatcacttgccgggcaagtcagagcattagcagctatttaaattggtatcagcagaaaccagggaaagcccctaagctcctgatctatgctgcatccagtttgcaaagtggggtcccatcaaggttcagtggcagtggatgcggtacagatttcactctcaccatcagcagtctgcaacctgaagattttgcaacttactactgtcagcaaagctacatcgccccttacacttttggcggagggaccaaggttgagatcaaaggagggggcggatcaggcggaggtggatcgggagggggtggtagcgaggtgcagctggtggagtctgggggaggcttggtccagcctggagggtccctgagactctcctgtgcagcctctggattcaccttcgtagaccacgacatggactgggtccgccaggctccagggaaggggctggagtgggttggccgtactagaaacaaactaggaagttacaccacagaatacgccgcgtctgtgaaaggcagattcaccatctcaagagatgattcaaagaactcactgtatctgcaaatgaacagcctgaaaaccgaggacacggcggtgtactactgcgccagagagcctaaatactggatcgacttcgacctatgggggagaggtaccttggtcaccgtctcctca

SEQ ID NO: 882 - DNA, 1203 bp, synthetic construct
  source 1..1203: mol_type = other DNA
cccgctgctctgctgcctgcccggggtaccaacatggcccagaagcgtcctgcctgcaccctgaagcctgagtgtgtccagcagctgctggtttgctcccaggaggccaagaagtcagcctactgcccctacagtcactttcctgtgggggctgccctgctcacccaggaggggagaatcttcaaagggtgcaacatagaaaatgcctgctacccgctgggcatctgtgctgaacggaccgctatccagaaggccgtctcagaagggtacaaggatttcagggcaattgctatcgccagtgacatgcaagatgattttatctctccatgtggggcctgcaggcaagtcatgagagagtttggcaccaactggcccgtgtacatgaccaagccggatggtacgtatattggtggaggcggttcgggtggagggggatctggtggcggaggtagcggtggcgggggatcagaggtgcagctgttggagtctgggggaggcttggtacagcctggggggtccctgagactctcctgtgcagcctctggattcacctttagcaattatgccatgagctgggtccgccaggctccagggaaggggctggagtgggtctcagctattagtggtagtggtggtagcacatactacgcagactccgtgaagggccggttcaccatctccagagacaattccaagaacacgctgtatctgcaaatgaacagcctgagagccgaggacacggcggtgtactactgcgccaagggccctcctacataccacacaaactactactacatggacgtatggggcaagggtacaactgtcaccgtctcctcaggagggggcggatcaggcggaggtggatcgggagggggtggtagcgacatccagatgacccagtctccatcttccgtgtctgcatctgtaggagacagagtcaccatcacttgtcgggcgagtcagggtattagcagctggttagcctggtatcagcagaaaccagggaaagcccctaagctcctgatctatgctgcatccagtttgcaaagtggggtcccatcaaggttcagcggcagtggatctgggacagatttcactctcaccatcagcagcctgcagcctgaagattttgcaacttattactgtcagcaaacaaatagtttcccttacacttttggcggagggaccaaggttgagatcaaa

SEQ ID NO: 883 - DNA, 1203 bp, synthetic construct
  source 1..1203: mol_type = other DNA
cccgctgctctgctgcctgcccggggtaccaacatggcccagaagcgtcctgcctgcaccctgaagcctgagtgtgtccagcagctgctggtttgctcccaggaggccaagaagtcagcctactgcccctacagtcactttcctgtgggggctgccctgctcacccaggaggggagaatcttcaaagggtgcaacatagaaaatgcctgctacccgctgggcatctgtgctgaacggaccgctatccagaaggccgtctcagaagggtacaaggatttcagggcaattgctatcgccagtgacatgcaagatgattttatctctccatgtggggcctgcaggcaagtcatgagagagtttggcaccaactggcccgtgtacatgaccaagccggatggtacgtatattggtggaggcggttcgggtggagggggatctggtggcggaggtagcggtggcgggggatcagaggtgcagctgttggagtctgggggaggcttggtacagcctggggggtccctgagactctcctgtgcagcctctggattcacctttagcagctatgtcatgatctgggtccgccaggctccagggaaggggctggagtgggtctcaagcattagtggtgacagcgtaacaacatactacgcagactccgtgaagggccggttcaccatctccagagacaattccaagaacacgctgtatctgcaaatgaacagcctgagagccgaggacacggcggtgtactactgcgccaagggccctcctacataccacacaaactactactacatggacgtatggggcaagggtacaactgtcaccgtctcctcaggagggggcggatcaggcggaggtggatcgggagggggtggtagcgacatccagatgacccagtctccatcttccgtgtctgcatctgtaggagacagagtcaccatcacttgtcgggcgagtcagggtattagcagctggttagcctggtatcagcagaaaccagggaaagcccctaagctcctgatctatgctgcatccagtttgcaaagtggggtcccatcaaggttcagcggcagtggatctgggacagatttcactctcaccatcagcagcctgcagcctgaagattttgcaacttattactgtcagcaaacaaatagtttcccttacacttttggcggagggaccaaggttgagatcaaa

SEQ ID NO: 884 - DNA, 1197 bp, synthetic construct
  source 1..1197: mol_type = other DNA
cccgctgctctgctgcctgcccggggtaccaacatggcccagaagcgtcctgcctgcaccctgaagcctgagtgtgtccagcagctgctggtttgctcccaggaggccaagaagtcagcctactgcccctacagtcactttcctgtgggggctgccctgctcacccaggaggggagaatcttcaaagggtgcaacatagaaaatgcctgctacccgctgggcatctgtgctgaacggaccgctatccagaaggccgtctcagaagggtacaaggatttcagggcaattgctatcgccagtgacatgcaagatgattttatctctccatgtggggcctgcaggcaagtcatgagagagtttggcaccaactggcccgtgtacatgaccaagccggatggtacgtatattggtggaggcggttcgggtggagggggatctggtggcggaggtagcggtggcgggggatcagaggtgcagctggtggagtctgggggaggcttggtccagcctggagggtccctgagactctcctgtgcagcctctggattcaccttcagtgaccactacatggactgggtccgccaggctccagggaaggggctggagtgggttggccgtactagaaacaaagctagtagttacaccacagaatacgccgcgtctgtgaaaggcagattcaccatctcaagagatgattcaaagaactcactgtatctgcaaatgaacagcctgaaaaccgaggacacggcggtgtactactgcgccagagagcctaaatactggatcgacttcgacctatgggggagaggtaccttggtcaccgtctcctcaggagggggcggatcaggcggaggtggatcgggagggggtggtagcgacatccagatgacccagtctccatcctccctgtctgcatctgtaggagacagagtcaccatcacttgccgggcaagtcagagcattagcagctatttaaattggtatcagcagaaaccagggaaagcccctaagctcctgatctatgctgcatccagtttgcaaagtggggtcccatcaaggttcagtggcagtggatctgggacagatttcactctcaccatcagcagtctgcaacctgaagattttgcaacttactactgtcagcaaagctacatcgccccttacacttttggcggagggaccaaggttgagatcaaa

SEQ ID NO: 885 - DNA, 1170 bp, synthetic construct
  source 1..1170: mol_type = other DNA
cccgctgctctgctgcctgcccggggtaccaacatggcccagaagcgtcctgcctgcaccctgaagcctgagtgtgtccagcagctgctggtttgctcccaggaggccaagaagtcagcctactgcccctacagtcactttcctgtgggggctgccctgctcacccaggaggggagaatcttcaaagggtgcaacatagaaaatgcctgctacccgctgggcatctgtgctgaacggaccgctatccagaaggccgtctcagaagggtacaaggatttcagggcaattgctatcgccagtgacatgcaagatgattttatctctccatgtggggcctgcaggcaagtcatgagagagtttggcaccaactggcccgtgtacatgaccaagccggatggtacgtatattggtggaggcggttcgggtggagggggatctggtggcggaggtagcggtggcgggggatcagaggtgcagctggtggagtctgggggaggcttggtacagccagggcggtccctgagactctcctgtacagcttctggattcaccttcagtgaccacgacatgaactgggtccgccaggctccagggaaggggctggagtgggttggccgtactagaaacgccgctggaagttacaccacagaatacgccgcgtctgtgaaaggcagattcaccatctcaagagatgattcaaagaactcactgtatctgcaaatgaacagcctgaaaaccgaggacacggcggtgtactactgcgccagagagcctaaatactggatcgacttcgacctatgggggggagggggcggatcaggcggaggtggatcgggagggggtggtagcgacatccagatgacccagtctccatcctccctgtctgcatctgtaggagacagagtcaccatcacttgccgggcaagtcagagcattagcagctatttaaattggtatcagcagaaaccagggaaagcccctaagctcctgatctatgctgcatccagtttgcaaagtggggtcccatcaaggttcagtggcagtggatctgggacagatttcactctcaccatcagcagtctgcaacctgaagattttgcaacttactactgtcagcaaagctacatcgccccttacacttttggcggagggaccaaggttgagatcaaa

SEQ ID NO: 886 - DNA, 1197 bp, synthetic construct
  source 1..1197: mol_type = other DNA
cccgctgctctgctgcctgcccggggtaccaacatggcccagaagcgtcctgcctgcaccctgaagcctgagtgtgtccagcagctgctggtttgctcccaggaggccaagaagtcagcctactgcccctacagtcactttcctgtgggggctgccctgctcacccaggaggggagaatcttcaaagggtgcaacatagaaaatgcctgctacccgctgggcatctgtgctgaacggaccgctatccagaaggccgtctcagaagggtacaaggatttcagggcaattgctatcgccagtgacatgcaagatgattttatctctccatgtggggcctgcaggcaagtcatgagagagtttggcaccaactggcccgtgtacatgaccaagccggatggtacgtatattggtggaggcggttcgggtggagggggatctggtggcggaggtagcggtggcgggggatcagacatccagatgacccagtctccatcctccctgtctgcatctgtaggagacagagtcaccatcacttgccgggcaagtcagagcattagcagctatttaaattggtatcagcagaaaccagggaaagcccctaagctcctgatctatgctgcatccagtttgcaaagtggggtcccatcaaggttcagtggcagtggatgcggtacagatttcactctcaccatcagcagtctgcaacctgaagattttgcaacttactactgtcagcaaagctacatcgccccttacacttttggcggagggaccaaggttgagatcaaaggagggggcggatcaggcggaggtggatcgggagggggtggtagcgaggtgcagctggtggagtctgggggaggcttggtccagcctggagggtccctgagactctcctgtgcagcctctggattcaccttcgtagaccacgacatggactgggtccgccaggctccagggaaggggctggagtgggttggccgtactagaaacaaactaggaagttacaccacagaatacgccgcgtctgtgaaaggcagattcaccatctcaagagatgattcaaagaactcactgtatctgcaaatgaacagcctgaaaaccgaggacacggcggtgtactactgcgccagagagcctaaatactggatcgacttcgacctatgggggagaggtaccttggtcaccgtctcctca

SEQ ID NO: 887 - DNA, 1218 bp, synthetic construct
  source 1..1218: mol_type = other DNA
cccgctgctctgctgcctgcccggggtaccaacatggcccagaagcgtcctgcctgcaccctgaagcctgagtgtgtccagcagctgctggtttgctcccaggaggccaagaagtcagcctactgcccctacagtcactttcctgtgggggctgccctgctcacccaggaggggagaatcttcaaagggtgcaacatagaaaatgcctgctacccgctgggcatctgtgctgaacggaccgctatccagaaggccgtctcagaagggtacaaggatttcagggcaattgctatcgccagtgacatgcaagatgattttatctctccatgtggggcctgcaggcaagtcatgagagagtttggcaccaactggcccgtgtacatgaccaagccggatggtacgtatattggtggaggcggttcgggtggagggggatctggtggcggaggtagcggtggcgggggatcaggtggcgggggatcagaggtgcagctgttggagtctgggggaggcttggtacagcctggggggtccctgagactctcctgtgcagcctctggattcacctttagcaattatgccatgagctgggtccgccaggctccagggaaggggctggagtgggtctcagctattagtggtagtggtggtagcacatactacgcagactccgtgaagggccggttcaccatctccagagacaattccaagaacacgctgtatctgcaaatgaacagcctgagagccgaggacacggcggtgtactactgcgccaagggccctcctacataccacacaaactactactacatggacgtatggggcaagggtacaactgtcaccgtctcctcaggagggggcggatcaggcggaggtggatcgggagggggtggtagcgacatccagatgacccagtctccatcttccgtgtctgcatctgtaggagacagagtcaccatcacttgtcgggcgagtcagggtattagcagctggttagcctggtatcagcagaaaccagggaaagcccctaagctcctgatctatgctgcatccagtttgcaaagtggggtcccatcaaggttcagcggcagtggatctgggacagatttcactctcaccatcagcagcctgcagcctgaagattttgcaacttattactgtcagcaaacaaatagtttcccttacacttttggcggagggaccaaggttgagatcaaa

SEQ ID NO: 888 - DNA, 1218 bp, synthetic construct
  source 1..1218: mol_type = other DNA
cccgctgctctgctgcctgcccggggtaccaacatggcccagaagcgtcctgcctgcaccctgaagcctgagtgtgtccagcagctgctggtttgctcccaggaggccaagaagtcagcctactgcccctacagtcactttcctgtgggggctgccctgctcacccaggaggggagaatcttcaaagggtgcaacatagaaaatgcctgctacccgctgggcatctgtgctgaacggaccgctatccagaaggccgtctcagaagggtacaaggatttcagggcaattgctatcgccagtgacatgcaagatgattttatctctccatgtggggcctgcaggcaagtcatgagagagtttggcaccaactggcccgtgtacatgaccaagccggatggtacgtatattggtggaggcggttcgggtggagggggatctggtggcggaggtagcggtggcgggggatcaggtggcgggggatcagaggtgcagctgttggagtctgggggaggcttggtacagcctggggggtccctgagactctcctgtgcagcctctggattcacctttagcagctatgtcatgatctgggtccgccaggctccagggaaggggctggagtgggtctcaagcattagtggtgacagcgtaacaacatactacgcagactccgtgaagggccggttcaccatctccagagacaattccaagaacacgctgtatctgcaaatgaacagcctgagagccgaggacacggcggtgtactactgcgccaagggccctcctacataccacacaaactactactacatggacgtatggggcaagggtacaactgtcaccgtctcctcaggagggggcggatcaggcggaggtggatcgggagggggtggtagcgacatccagatgacccagtctccatcttccgtgtctgcatctgtaggagacagagtcaccatcacttgtcgggcgagtcagggtattagcagctggttagcctggtatcagcagaaaccagggaaagcccctaagctcctgatctatgctgcatccagtttgcaaagtggggtcccatcaaggttcagcggcagtggatctgggacagatttcactctcaccatcagcagcctgcagcctgaagattttgcaacttattactgtcagcaaacaaatagtttcccttacacttttggcggagggaccaaggttgagatcaaa

SEQ ID NO: 889 - DNA, 1212 bp, synthetic construct
  source 1..1212: mol_type = other DNA
cccgctgctctgctgcctgcccggggtaccaacatggcccagaagcgtcctgcctgcaccctgaagcctgagtgtgtccagcagctgctggtttgctcccaggaggccaagaagtcagcctactgcccctacagtcactttcctgtgggggctgccctgctcacccaggaggggagaatcttcaaagggtgcaacatagaaaatgcctgctacccgctgggcatctgtgctgaacggaccgctatccagaaggccgtctcagaagggtacaaggatttcagggcaattgctatcgccagtgacatgcaagatgattttatctctccatgtggggcctgcaggcaagtcatgagagagtttggcaccaactggcccgtgtacatgaccaagccggatggtacgtatattggtggaggcggttcgggtggagggggatctggtggcggaggtagcggtggcgggggatcaggtggcgggggatcagaggtgcagctggtggagtctgggggaggcttggtccagcctggagggtccctgagactctcctgtgcagcctctggattcaccttcagtgaccactacatggactgggtccgccaggctccagggaaggggctggagtgggttggccgtactagaaacaaagctagtagttacaccacagaatacgccgcgtctgtgaaaggcagattcaccatctcaagagatgattcaaagaactcactgtatctgcaaatgaacagcctgaaaaccgaggacacggcggtgtactactgcgccagagagcctaaatactggatcgacttcgacctatgggggagaggtaccttggtcaccgtctcctcaggagggggcggatcaggcggaggtggatcgggagggggtggtagcgacatccagatgacccagtctccatcctccctgtctgcatctgtaggagacagagtcaccatcacttgccgggcaagtcagagcattagcagctatttaaattggtatcagcagaaaccagggaaagcccctaagctcctgatctatgctgcatccagtttgcaaagtggggtcccatcaaggttcagtggcagtggatctgggacagatttcactctcaccatcagcagtctgcaacctgaagattttgcaacttactactgtcagcaaagctacatcgccccttacacttttggcggagggaccaaggttgagatcaaa

SEQ ID NO: 890 - DNA, 1185 bp, synthetic construct
  source 1..1185: mol_type = other DNA
cccgctgctctgctgcctgcccggggtaccaacatggcccagaagcgtcctgcctgcaccctgaagcctgagtgtgtccagcagctgctggtttgctcccaggaggccaagaagtcagcctactgcccctacagtcactttcctgtgggggctgccctgctcacccaggaggggagaatcttcaaagggtgcaacatagaaaatgcctgctacccgctgggcatctgtgctgaacggaccgctatccagaaggccgtctcagaagggtacaaggatttcagggcaattgctatcgccagtgacatgcaagatgattttatctctccatgtggggcctgcaggcaagtcatgagagagtttggcaccaactggcccgtgtacatgaccaagccggatggtacgtatattggtggaggcggttcgggtggagggggatctggtggcggaggtagcggtggcgggggatcaggtggcgggggatcagaggtgcagctggtggagtctgggggaggcttggtacagccagggcggtccctgagactctcctgtacagcttctggattcaccttcagtgaccacgacatgaactgggtccgccaggctccagggaaggggctggagtgggttggccgtactagaaacgccgctggaagttacaccacagaatacgccgcgtctgtgaaaggcagattcaccatctcaagagatgattcaaagaactcactgtatctgcaaatgaacagcctgaaaaccgaggacacggcggtgtactactgcgccagagagcctaaatactggatcgacttcgacctatgggggggagggggcggatcaggcggaggtggatcgggagggggtggtagcgacatccagatgacccagtctccatcctccctgtctgcatctgtaggagacagagtcaccatcacttgccgggcaagtcagagcattagcagctatttaaattggtatcagcagaaaccagggaaagcccctaagctcctgatctatgctgcatccagtttgcaaagtggggtcccatcaaggttcagtggcagtggatctgggacagatttcactctcaccatcagcagtctgcaacctgaagattttgcaacttactactgtcagcaaagctacatcgccccttacacttttggcggagggaccaaggttgagatcaaa

SEQ ID NO: 891 - DNA, 1212 bp, synthetic construct
  source 1..1212: mol_type = other DNA
cccgctgctctgctgcctgcccggggtaccaacatggcccagaagcgtcctgcctgcaccctgaagcctgagtgtgtccagcagctgctggtttgctcccaggaggccaagaagtcagcctactgcccctacagtcactttcctgtgggggctgccctgctcacccaggaggggagaatcttcaaagggtgcaacatagaaaatgcctgctacccgctgggcatctgtgctgaacggaccgctatccagaaggccgtctcagaagggtacaaggatttcagggcaattgctatcgccagtgacatgcaagatgattttatctctccatgtggggcctgcaggcaagtcatgagagagtttggcaccaactggcccgtgtacatgaccaagccggatggtacgtatattggtggaggcggttcgggtggagggggatctggtggcggaggtagcggtggcgggggatcaggtggcgggggatcagacatccagatgacccagtctccatcctccctgtctgcatctgtaggagacagagtcaccatcacttgccgggcaagtcagagcattagcagctatttaaattggtatcagcagaaaccagggaaagcccctaagctcctgatctatgctgcatccagtttgcaaagtggggtcccatcaaggttcagtggcagtggatgcggtacagatttcactctcaccatcagcagtctgcaacctgaagattttgcaacttactactgtcagcaaagctacatcgccccttacacttttggcggagggaccaaggttgagatcaaaggagggggcggatcaggcggaggtggatcgggagggggtggtagcgaggtgcagctggtggagtctgggggaggcttggtccagcctggagggtccctgagactctcctgtgcagcctctggattcaccttcgtagaccacgacatggactgggtccgccaggctccagggaaggggctggagtgggttggccgtactagaaacaaactaggaagttacaccacagaatacgccgcgtctgtgaaaggcagattcaccatctcaagagatgattcaaagaactcactgtatctgcaaatgaacagcctgaaaaccgaggacacggcggtgtactactgcgccagagagcctaaatactggatcgacttcgacctatgggggagaggtaccttggtcaccgtctcctca

SEQ ID NO: 892 - DNA, 1233 bp, synthetic construct
  source 1..1233: mol_type = other DNA
cccgctgctctgctgcctgcccggggtaccaacatggcccagaagcgtcctgcctgcaccctgaagcctgagtgtgtccagcagctgctggtttgctcccaggaggccaagaagtcagcctactgcccctacagtcactttcctgtgggggctgccctgctcacccaggaggggagaatcttcaaagggtgcaacatagaaaatgcctgctacccgctgggcatctgtgctgaacggaccgctatccagaaggccgtctcagaagggtacaaggatttcagggcaattgctatcgccagtgacatgcaagatgattttatctctccatgtggggcctgcaggcaagtcatgagagagtttggcaccaactggcccgtgtacatgaccaagccggatggtacgtatattggtggaggcggttcgggtggagggggatctggtggcggaggtagcggtggcgggggatcaggtggcgggggatcaggtggcgggggatcagaggtgcagctgttggagtctgggggaggcttggtacagcctggggggtccctgagactctcctgtgcagcctctggattcacctttagcaattatgccatgagctgggtccgccaggctccagggaaggggctggagtgggtctcagctattagtggtagtggtggtagcacatactacgcagactccgtgaagggccggttcaccatctccagagacaattccaagaacacgctgtatctgcaaatgaacagcctgagagccgaggacacggcggtgtactactgcgccaagggccctcctacataccacacaaactactactacatggacgtatggggcaagggtacaactgtcaccgtctcctcaggagggggcggatcaggcggaggtggatcgggagggggtggtagcgacatccagatgacccagtctccatcttccgtgtctgcatctgtaggagacagagtcaccatcacttgtcgggcgagtcagggtattagcagctggttagcctggtatcagcagaaaccagggaaagcccctaagctcctgatctatgctgcatccagtttgcaaagtggggtcccatcaaggttcagcggcagtggatctgggacagatttcactctcaccatcagcagcctgcagcctgaagattttgcaacttattactgtcagcaaacaaatagtttcccttacacttttggcggagggaccaaggttgagatcaaa

SEQ ID NO: 893 - DNA, 1233 bp, synthetic construct
  source 1..1233: mol_type = other DNA
cccgctgctctgctgcctgcccggggtaccaacatggcccagaagcgtcctgcctgcaccctgaagcctgagtgtgtccagcagctgctggtttgctcccaggaggccaagaagtcagcctactgcccctacagtcactttcctgtgggggctgccctgctcacccaggaggggagaatcttcaaagggtgcaacatagaaaatgcctgctacccgctgggcatctgtgctgaacggaccgctatccagaaggccgtctcagaagggtacaaggatttcagggcaattgctatcgccagtgacatgcaagatgattttatctctccatgtggggcctgcaggcaagtcatgagagagtttggcaccaactggcccgtgtacatgaccaagccggatggtacgtatattggtggaggcggttcgggtggagggggatctggtggcggaggtagcggtggcgggggatcaggtggcgggggatcaggtggcgggggatcagaggtgcagctgttggagtctgggggaggcttggtacagcctggggggtccctgagactctcctgtgcagcctctggattcacctttagcagctatgtcatgatctgggtccgccaggctccagggaaggggctggagtgggtctcaagcattagtggtgacagcgtaacaacatactacgcagactccgtgaagggccggttcaccatctccagagacaattccaagaacacgctgtatctgcaaatgaacagcctgagagccgaggacacggcggtgtactactgcgccaagggccctcctacataccacacaaactactactacatggacgtatggggcaagggtacaactgtcaccgtctcctcaggagggggcggatcaggcggaggtggatcgggagggggtggtagcgacatccagatgacccagtctccatcttccgtgtctgcatctgtaggagacagagtcaccatcacttgtcgggcgagtcagggtattagcagctggttagcctggtatcagcagaaaccagggaaagcccctaagctcctgatctatgctgcatccagtttgcaaagtggggtcccatcaaggttcagcggcagtggatctgggacagatttcactctcaccatcagcagcctgcagcctgaagattttgcaacttattactgtcagcaaacaaatagtttcccttacacttttggcggagggaccaaggttgagatcaaa

SEQ ID NO: 894 - DNA, 1227 bp, synthetic construct
  source 1..1227: mol_type = other DNA
cccgctgctctgctgcctgcccggggtaccaacatggcccagaagcgtcctgcctgcaccctgaagcctgagtgtgtccagcagctgctggtttgctcccaggaggccaagaagtcagcctactgcccctacagtcactttcctgtgggggctgccctgctcacccaggaggggagaatcttcaaagggtgcaacatagaaaatgcctgctacccgctgggcatctgtgctgaacggaccgctatccagaaggccgtctcagaagggtacaaggatttcagggcaattgctatcgccagtgacatgcaagatgattttatctctccatgtggggcctgcaggcaagtcatgagagagtttggcaccaactggcccgtgtacatgaccaagccggatggtacgtatattggtggaggcggttcgggtggagggggatctggtggcggaggtagcggtggcgggggatcaggtggcgggggatcaggtggcgggggatcagaggtgcagctggtggagtctgggggaggcttggtccagcctggagggtccctgagactctcctgtgcagcctctggattcaccttcagtgaccactacatggactgggtccgccaggctccagggaaggggctggagtgggttggccgtactagaaacaaagctagtagttacaccacagaatacgccgcgtctgtgaaaggcagattcaccatctcaagagatgattcaaagaactcactgtatctgcaaatgaacagcctgaaaaccgaggacacggcggtgtactactgcgccagagagcctaaatactggatcgacttcgacctatgggggagaggtaccttggtcaccgtctcctcaggagggggcggatcaggcggaggtggatcgggagggggtggtagcgacatccagatgacccagtctccatcctccctgtctgcatctgtaggagacagagtcaccatcacttgccgggcaagtcagagcattagcagctatttaaattggtatcagcagaaaccagggaaagcccctaagctcctgatctatgctgcatccagtttgcaaagtggggtcccatcaaggttcagtggcagtggatctgggacagatttcactctcaccatcagcagtctgcaacctgaagattttgcaacttactactgtcagcaaagctacatcgccccttacacttttggcggagggaccaaggttgagatcaaa

SEQ ID NO: 895 - DNA, 1200 bp, synthetic construct
  source 1..1200: mol_type = other DNA
cccgctgctctgctgcctgcccggggtaccaacatggcccagaagcgtcctgcctgcaccctgaagcctgagtgtgtccagcagctgctggtttgctcccaggaggccaagaagtcagcctactgcccctacagtcactttcctgtgggggctgccctgctcacccaggaggggagaatcttcaaagggtgcaacatagaaaatgcctgctacccgctgggcatctgtgctgaacggaccgctatccagaaggccgtctcagaagggtacaaggatttcagggcaattgctatcgccagtgacatgcaagatgattttatctctccatgtggggcctgcaggcaagtcatgagagagtttggcaccaactggcccgtgtacatgaccaagccggatggtacgtatattggtggaggcggttcgggtggagggggatctggtggcggaggtagcggtggcgggggatcaggtggcgggggatcaggtggcgggggatcagaggtgcagctggtggagtctgggggaggcttggtacagccagggcggtccctgagactctcctgtacagcttctggattcaccttcagtgaccacgacatgaactgggtccgccaggctccagggaaggggctggagtgggttggccgtactagaaacgccgctggaagttacaccacagaatacgccgcgtctgtgaaaggcagattcaccatctcaagagatgattcaaagaactcactgtatctgcaaatgaacagcctgaaaaccgaggacacggcggtgtactactgcgccagagagcctaaatactggatcgacttcgacctatgggggggagggggcggatcaggcggaggtggatcgggagggggtggtagcgacatccagatgacccagtctccatcctccctgtctgcatctgtaggagacagagtcaccatcacttgccgggcaagtcagagcattagcagctatttaaattggtatcagcagaaaccagggaaagcccctaagctcctgatctatgctgcatccagtttgcaaagtggggtcccatcaaggttcagtggcagtggatctgggacagatttcactctcaccatcagcagtctgcaacctgaagattttgcaacttactactgtcagcaaagctacatcgccccttacacttttggcggagggaccaaggttgagatcaaa

SEQ ID NO: 896 - DNA, 1227 bp, synthetic construct
  source 1..1227: mol_type = other DNA
cccgctgctctgctgcctgcccggggtaccaacatggcccagaagcgtcctgcctgcaccctgaagcctgagtgtgtccagcagctgctggtttgctcccaggaggccaagaagtcagcctactgcccctacagtcactttcctgtgggggctgccctgctcacccaggaggggagaatcttcaaagggtgcaacatagaaaatgcctgctacccgctgggcatctgtgctgaacggaccgctatccagaaggccgtctcagaagggtacaaggatttcagggcaattgctatcgccagtgacatgcaagatgattttatctctccatgtggggcctgcaggcaagtcatgagagagtttggcaccaactggcccgtgtacatgaccaagccggatggtacgtatattggtggaggcggttcgggtggagggggatctggtggcggaggtagcggtggcgggggatcaggtggcgggggatcaggtggcgggggatcagacatccagatgacccagtctccatcctccctgtctgcatctgtaggagacagagtcaccatcacttgccgggcaagtcagagcattagcagctatttaaattggtatcagcagaaaccagggaaagcccctaagctcctgatctatgctgcatccagtttgcaaagtggggtcccatcaaggttcagtggcagtggatgcggtacagatttcactctcaccatcagcagtctgcaacctgaagattttgcaacttactactgtcagcaaagctacatcgccccttacacttttggcggagggaccaaggttgagatcaaaggagggggcggatcaggcggaggtggatcgggagggggtggtagcgaggtgcagctggtggagtctgggggaggcttggtccagcctggagggtccctgagactctcctgtgcagcctctggattcaccttcgtagaccacgacatggactgggtccgccaggctccagggaaggggctggagtgggttggccgtactagaaacaaactaggaagttacaccacagaatacgccgcgtctgtgaaaggcagattcaccatctcaagagatgattcaaagaactcactgtatctgcaaatgaacagcctgaaaaccgaggacacggcggtgtactactgcgccagagagcctaaatactggatcgacttcgacctatgggggagaggtaccttggtcaccgtctcctca

SEQ ID NO: 897 - DNA, 1248 bp, synthetic construct
  source 1..1248: mol_type = other DNA
cccgctgctctgctgcctgcccggggtaccaacatggcccagaagcgtcctgcctgcaccctgaagcctgagtgtgtccagcagctgctggtttgctcccaggaggccaagaagtcagcctactgcccctacagtcactttcctgtgggggctgccctgctcacccaggaggggagaatcttcaaagggtgcaacatagaaaatgcctgctacccgctgggcatctgtgctgaacggaccgctatccagaaggccgtctcagaagggtacaaggatttcagggcaattgctatcgccagtgacatgcaagatgattttatctctccatgtggggcctgcaggcaagtcatgagagagtttggcaccaactggcccgtgtacatgaccaagccggatggtacgtatattggtggaggcggttcgggtggagggggatctggtggcggaggtagcggtggcgggggatcaggtggcgggggatcaggtggcgggggatcaggtggcgggggatcagaggtgcagctgttggagtctgggggaggcttggtacagcctggggggtccctgagactctcctgtgcagcctctggattcacctttagcaattatgccatgagctgggtccgccaggctccagggaaggggctggagtgggtctcagctattagtggtagtggtggtagcacatactacgcagactccgtgaagggccggttcaccatctccagagacaattccaagaacacgctgtatctgcaaatgaacagcctgagagccgaggacacggcggtgtactactgcgccaagggccctcctacataccacacaaactactactacatggacgtatggggcaagggtacaactgtcaccgtctcctcaggagggggcggatcaggcggaggtggatcgggagggggtggtagcgacatccagatgacccagtctccatcttccgtgtctgcatctgtaggagacagagtcaccatcacttgtcgggcgagtcagggtattagcagctggttagcctggtatcagcagaaaccagggaaagcccctaagctcctgatctatgctgcatccagtttgcaaagtggggtcccatcaaggttcagcggcagtggatctgggacagatttcactctcaccatcagcagcctgcagcctgaagattttgcaacttattactgtcagcaaacaaatagtttcccttacacttttggcggagggaccaaggttgagatcaaa

SEQ ID NO: 898 - DNA, 1248 bp, synthetic construct
  source 1..1248: mol_type = other DNA
cccgctgctctgctgcctgcccggggtaccaacatggcccagaagcgtcctgcctgcaccctgaagcctgagtgtgtccagcagctgctggtttgctcccaggaggccaagaagtcagcctactgcccctacagtcactttcctgtgggggctgccctgctcacccaggaggggagaatcttcaaagggtgcaacatagaaaatgcctgctacccgctgggcatctgtgctgaacggaccgctatccagaaggccgtctcagaagggtacaaggatttcagggcaattgctatcgccagtgacatgcaagatgattttatctctccatgtggggcctgcaggcaagtcatgagagagtttggcaccaactggcccgtgtacatgaccaagccggatggtacgtatattggtggaggcggttcgggtggagggggatctggtggcggaggtagcggtggcgggggatcaggtggcgggggatcaggtggcgggggatcaggtggcgggggatcagaggtgcagctgttggagtctgggggaggcttggtacagcctggggggtccctgagactctcctgtgcagcctctggattcacctttagcagctatgtcatgatctgggtccgccaggctccagggaaggggctggagtgggtctcaagcattagtggtgacagcgtaacaacatactacgcagactccgtgaagggccggttcaccatctccagagacaattccaagaacacgctgtatctgcaaatgaacagcctgagagccgaggacacggcggtgtactactgcgccaagggccctcctacataccacacaaactactactacatggacgtatggggcaagggtacaactgtcaccgtctcctcaggagggggcggatcaggcggaggtggatcgggagggggtggtagcgacatccagatgacccagtctccatcttccgtgtctgcatctgtaggagacagagtcaccatcacttgtcgggcgagtcagggtattagcagctggttagcctggtatcagcagaaaccagggaaagcccctaagctcctgatctatgctgcatccagtttgcaaagtggggtcccatcaaggttcagcggcagtggatctgggacagatttcactctcaccatcagcagcctgcagcctgaagattttgcaacttattactgtcagcaaacaaatagtttcccttacacttttggcggagggaccaaggttgagatcaaa

SEQ ID NO: 899 - DNA, 1242 bp, synthetic construct
  source 1..1242: mol_type = other DNA
cccgctgctctgctgcctgcccggggtaccaacatggcccagaagcgtcctgcctgcaccctgaagcctgagtgtgtccagcagctgctggtttgctcccaggaggccaagaagtcagcctactgcccctacagtcactttcctgtgggggctgccctgctcacccaggaggggagaatcttcaaagggtgcaacatagaaaatgcctgctacccgctgggcatctgtgctgaacggaccgctatccagaaggccgtctcagaagggtacaaggatttcagggcaattgctatcgccagtgacatgcaagatgattttatctctccatgtggggcctgcaggcaagtcatgagagagtttggcaccaactggcccgtgtacatgaccaagccggatggtacgtatattggtggaggcggttcgggtggagggggatctggtggcggaggtagcggtggcgggggatcaggtggcgggggatcaggtggcgggggatcaggtggcgggggatcagaggtgcagctggtggagtctgggggaggcttggtccagcctggagggtccctgagactctcctgtgcagcctctggattcaccttcagtgaccactacatggactgggtccgccaggctccagggaaggggctggagtgggttggccgtactagaaacaaagctagtagttacaccacagaatacgccgcgtctgtgaaaggcagattcaccatctcaagagatgattcaaagaactcactgtatctgcaaatgaacagcctgaaaaccgaggacacggcggtgtactactgcgccagagagcctaaatactggatcgacttcgacctatgggggagaggtaccttggtcaccgtctcctcaggagggggcggatcaggcggaggtggatcgggagggggtggtagcgacatccagatgacccagtctccatcctccctgtctgcatctgtaggagacagagtcaccatcacttgccgggcaagtcagagcattagcagctatttaaattggtatcagcagaaaccagggaaagcccctaagctcctgatctatgctgcatccagtttgcaaagtggggtcccatcaaggttcagtggcagtggatctgggacagatttcactctcaccatcagcagtctgcaacctgaagattttgcaacttactactgtcagcaaagctacatcgccccttacacttttggcggagggaccaaggttgagatcaaa

SEQ ID NO: 900 - DNA, 1215 bp, synthetic construct
  source 1..1215: mol_type = other DNA
cccgctgctctgctgcctgcccggggtaccaacatggcccagaagcgtcctgcctgcaccctgaagcctgagtgtgtccagcagctgctggtttgctcccaggaggccaagaagtcagcctactgcccctacagtcactttcctgtgggggctgccctgctcacccaggaggggagaatcttcaaagggtgcaacatagaaaatgcctgctacccgctgggcatctgtgctgaacggaccgctatccagaaggccgtctcagaagggtacaaggatttcagggcaattgctatcgccagtgacatgcaagatgattttatctctccatgtggggcctgcaggcaagtcatgagagagtttggcaccaactggcccgtgtacatgaccaagccggatggtacgtatattggtggaggcggttcgggtggagggggatctggtggcggaggtagcggtggcgggggatcaggtggcgggggatcaggtggcgggggatcaggtggcgggggatcagaggtgcagctggtggagtctgggggaggcttggtacagccagggcggtccctgagactctcctgtacagcttctggattcaccttcagtgaccacgacatgaactgggtccgccaggctccagggaaggggctggagtgggttggccgtactagaaacgccgctggaagttacaccacagaatacgccgcgtctgtgaaaggcagattcaccatctcaagagatgattcaaagaactcactgtatctgcaaatgaacagcctgaaaaccgaggacacggcggtgtactactgcgccagagagcctaaatactggatcgacttcgacctatgggggggagggggcggatcaggcggaggtggatcgggagggggtggtagcgacatccagatgacccagtctccatcctccctgtctgcatctgtaggagacagagtcaccatcacttgccgggcaagtcagagcattagcagctatttaaattggtatcagcagaaaccagggaaagcccctaagctcctgatctatgctgcatccagtttgcaaagtggggtcccatcaaggttcagtggcagtggatctgggacagatttcactctcaccatcagcagtctgcaacctgaagattttgcaacttactactgtcagcaaagctacatcgccccttacacttttggcggagggaccaaggttgagatcaaa

SEQ ID NO: 901 - DNA, 1242 bp, synthetic construct
  source 1..1242: mol_type = other DNA
cccgctgctctgctgcctgcccggggtaccaacatggcccagaagcgtcctgcctgcaccctgaagcctgagtgtgtccagcagctgctggtttgctcccaggaggccaagaagtcagcctactgcccctacagtcactttcctgtgggggctgccctgctcacccaggaggggagaatcttcaaagggtgcaacatagaaaatgcctgctacccgctgggcatctgtgctgaacggaccgctatccagaaggccgtctcagaagggtacaaggatttcagggcaattgctatcgccagtgacatgcaagatgattttatctctccatgtggggcctgcaggcaagtcatgagagagtttggcaccaactggcccgtgtacatgaccaagccggatggtacgtatattggtggaggcggttcgggtggagggggatctggtggcggaggtagcggtggcgggggatcaggtggcgggggatcaggtggcgggggatcaggtggcgggggatcagacatccagatgacccagtctccatcctccctgtctgcatctgtaggagacagagtcaccatcacttgccgggcaagtcagagcattagcagctatttaaattggtatcagcagaaaccagggaaagcccctaagctcctgatctatgctgcatccagtttgcaaagtggggtcccatcaaggttcagtggcagtggatgcggtacagatttcactctcaccatcagcagtctgcaacctgaagattttgcaacttactactgtcagcaaagctacatcgccccttacacttttggcggagggaccaaggttgagatcaaaggagggggcggatcaggcggaggtggatcgggagggggtggtagcgaggtgcagctggtggagtctgggggaggcttggtccagcctggagggtccctgagactctcctgtgcagcctctggattcaccttcgtagaccacgacatggactgggtccgccaggctccagggaaggggctggagtgggttggccgtactagaaacaaactaggaagttacaccacagaatacgccgcgtctgtgaaaggcagattcaccatctcaagagatgattcaaagaactcactgtatctgcaaatgaacagcctgaaaaccgaggacacggcggtgtactactgcgccagagagcctaaatactggatcgacttcgacctatgggggagaggtaccttggtcaccgtctcctca

SEQ ID NO: 902 - DNA, 1263 bp, synthetic construct
  source 1..1263: mol_type = other DNA
cccgctgctctgctgcctgcccggggtaccaacatggcccagaagcgtcctgcctgcaccctgaagcctgagtgtgtccagcagctgctggtttgctcccaggaggccaagaagtcagcctactgcccctacagtcactttcctgtgggggctgccctgctcacccaggaggggagaatcttcaaagggtgcaacatagaaaatgcctgctacccgctgggcatctgtgctgaacggaccgctatccagaaggccgtctcagaagggtacaaggatttcagggcaattgctatcgccagtgacatgcaagatgattttatctctccatgtggggcctgcaggcaagtcatgagagagtttggcaccaactggcccgtgtacatgaccaagccggatggtacgtatattggtggaggcggttcgggtggagggggatctggtggcggaggtagcggtggcgggggatcaggtggcgggggatcaggtggcgggggatcaggtggcgggggatcaggtggcgggggatcagaggtgcagctgttggagtctgggggaggcttggtacagcctggggggtccctgagactctcctgtgcagcctctggattcacctttagcaattatgccatgagctgggtccgccaggctccagggaaggggctggagtgggtctcagctattagtggtagtggtggtagcacatactacgcagactccgtgaagggccggttcaccatctccagagacaattccaagaacacgctgtatctgcaaatgaacagcctgagagccgaggacacggcggtgtactactgcgccaagggccctcctacataccacacaaactactactacatggacgtatggggcaagggtacaactgtcaccgtctcctcaggagggggcggatcaggcggaggtggatcgggagggggtggtagcgacatccagatgacccagtctccatcttccgtgtctgcatctgtaggagacagagtcaccatcacttgtcgggcgagtcagggtattagcagctggttagcctggtatcagcagaaaccagggaaagcccctaagctcctgatctatgctgcatccagtttgcaaagtggggtcccatcaaggttcagcggcagtggatctgggacagatttcactctcaccatcagcagcctgcagcctgaagattttgcaacttattactgtcagcaaacaaatagtttcccttacacttttggcggagggaccaaggttgagatcaaa

SEQ ID NO: 903 - DNA, 1263 bp, synthetic construct
  source 1..1263: mol_type = other DNA
cccgctgctctgctgcctgcccggggtaccaacatggcccagaagcgtcctgcctgcaccctgaagcctgagtgtgtccagcagctgctggtttgctcccaggaggccaagaagtcagcctactgcccctacagtcactttcctgtgggggctgccctgctcacccaggaggggagaatcttcaaagggtgcaacatagaaaatgcctgctacccgctgggcatctgtgctgaacggaccgctatccagaaggccgtctcagaagggtacaaggatttcagggcaattgctatcgccagtgacatgcaagatgattttatctctccatgtggggcctgcaggcaagtcatgagagagtttggcaccaactggcccgtgtacatgaccaagccggatggtacgtatattggtggaggcggttcgggtggagggggatctggtggcggaggtagcggtggcgggggatcaggtggcgggggatcaggtggcgggggatcaggtggcgggggatcaggtggcgggggatcagaggtgcagctgttggagtctgggggaggcttggtacagcctggggggtccctgagactctcctgtgcagcctctggattcacctttagcagctatgtcatgatctgggtccgccaggctccagggaaggggctggagtgggtctcaagcattagtggtgacagcgtaacaacatactacgcagactccgtgaagggccggttcaccatctccagagacaattccaagaacacgctgtatctgcaaatgaacagcctgagagccgaggacacggcggtgtactactgcgccaagggccctcctacataccacacaaactactactacatggacgtatggggcaagggtacaactgtcaccgtctcctcaggagggggcggatcaggcggaggtggatcgggagggggtggtagcgacatccagatgacccagtctccatcttccgtgtctgcatctgtaggagacagagtcaccatcacttgtcgggcgagtcagggtattagcagctggttagcctggtatcagcagaaaccagggaaagcccctaagctcctgatctatgctgcatccagtttgcaaagtggggtcccatcaaggttcagcggcagtggatctgggacagatttcactctcaccatcagcagcctgcagcctgaagattttgcaacttattactgtcagcaaacaaatagtttcccttacacttttggcggagggaccaaggttgagatcaaa

SEQ ID NO: 904 - DNA, 1257 bp, synthetic construct
  source 1..1257: mol_type = other DNA
cccgctgctctgctgcctgcccggggtaccaacatggcccagaagcgtcctgcctgcaccctgaagcctgagtgtgtccagcagctgctggtttgctcccaggaggccaagaagtcagcctactgcccctacagtcactttcctgtgggggctgccctgctcacccaggaggggagaatcttcaaagggtgcaacatagaaaatgcctgctacccgctgggcatctgtgctgaacggaccgctatccagaaggccgtctcagaagggtacaaggatttcagggcaattgctatcgccagtgacatgcaagatgattttatctctccatgtggggcctgcaggcaagtcatgagagagtttggcaccaactggcccgtgtacatgaccaagccggatggtacgtatattggtggaggcggttcgggtggagggggatctggtggcggaggtagcggtggcgggggatcaggtggcgggggatcaggtggcgggggatcaggtggcgggggatcaggtggcgggggatcagaggtgcagctggtggagtctgggggaggcttggtccagcctggagggtccctgagactctcctgtgcagcctctggattcaccttcagtgaccactacatggactgggtccgccaggctccagggaaggggctggagtgggttggccgtactagaaacaaagctagtagttacaccacagaatacgccgcgtctgtgaaaggcagattcaccatctcaagagatgattcaaagaactcactgtatctgcaaatgaacagcctgaaaaccgaggacacggcggtgtactactgcgccagagagcctaaatactggatcgacttcgacctatgggggagaggtaccttggtcaccgtctcctcaggagggggcggatcaggcggaggtggatcgggagggggtggtagcgacatccagatgacccagtctccatcctccctgtctgcatctgtaggagacagagtcaccatcacttgccgggcaagtcagagcattagcagctatttaaattggtatcagcagaaaccagggaaagcccctaagctcctgatctatgctgcatccagtttgcaaagtggggtcccatcaaggttcagtggcagtggatctgggacagatttcactctcaccatcagcagtctgcaacctgaagattttgcaacttactactgtcagcaaagctacatcgccccttacacttttggcggagggaccaaggttgagatcaaa

SEQ ID NO: 905 - DNA, 1230 bp, synthetic construct
  source 1..1230: mol_type = other DNA
cccgctgctctgctgcctgcccggggtaccaacatggcccagaagcgtcctgcctgcaccctgaagcctgagtgtgtccagcagctgctggtttgctcccaggaggccaagaagtcagcctactgcccctacagtcactttcctgtgggggctgccctgctcacccaggaggggagaatcttcaaagggtgcaacatagaaaatgcctgctacccgctgggcatctgtgctgaacggaccgctatccagaaggccgtctcagaagggtacaaggatttcagggcaattgctatcgccagtgacatgcaagatgattttatctctccatgtggggcctgcaggcaagtcatgagagagtttggcaccaactggcccgtgtacatgaccaagccggatggtacgtatattggtggaggcggttcgggtggagggggatctggtggcggaggtagcggtggcgggggatcaggtggcgggggatcaggtggcgggggatcaggtggcgggggatcaggtggcgggggatcagaggtgcagctggtggagtctgggggaggcttggtacagccagggcggtccctgagactctcctgtacagcttctggattcaccttcagtgaccacgacatgaactgggtccgccaggctccagggaaggggctggagtgggttggccgtactagaaacgccgctggaagttacaccacagaatacgccgcgtctgtgaaaggcagattcaccatctcaagagatgattcaaagaactcactgtatctgcaaatgaacagcctgaaaaccgaggacacggcggtgtactactgcgccagagagcctaaatactggatcgacttcgacctatgggggggagggggcggatcaggcggaggtggatcgggagggggtggtagcgacatccagatgacccagtctccatcctccctgtctgcatctgtaggagacagagtcaccatcacttgccgggcaagtcagagcattagcagctatttaaattggtatcagcagaaaccagggaaagcccctaagctcctgatctatgctgcatccagtttgcaaagtggggtcccatcaaggttcagtggcagtggatctgggacagatttcactctcaccatcagcagtctgcaacctgaagattttgcaacttactactgtcagcaaagctacatcgccccttacacttttggcggagggaccaaggttgagatcaaa

SEQ ID NO: 906 - DNA, 1257 bp, synthetic construct
  source 1..1257: mol_type = other DNA
cccgctgctctgctgcctgcccggggtaccaacatggcccagaagcgtcctgcctgcaccctgaagcctgagtgtgtccagcagctgctggtttgctcccaggaggccaagaagtcagcctactgcccctacagtcactttcctgtgggggctgccctgctcacccaggaggggagaatcttcaaagggtgcaacatagaaaatgcctgctacccgctgggcatctgtgctgaacggaccgctatccagaaggccgtctcagaagggtacaaggatttcagggcaattgctatcgccagtgacatgcaagatgattttatctctccatgtggggcctgcaggcaagtcatgagagagtttggcaccaactggcccgtgtacatgaccaagccggatggtacgtatattggtggaggcggttcgggtggagggggatctggtggcggaggtagcggtggcgggggatcaggtggcgggggatcaggtggcgggggatcaggtggcgggggatcaggtggcgggggatcagacatccagatgacccagtctccatcctccctgtctgcatctgtaggagacagagtcaccatcacttgccgggcaagtcagagcattagcagctatttaaattggtatcagcagaaaccagggaaagcccctaagctcctgatctatgctgcatccagtttgcaaagtggggtcccatcaaggttcagtggcagtggatgcggtacagatttcactctcaccatcagcagtctgcaacctgaagattttgcaacttactactgtcagcaaagctacatcgccccttacacttttggcggagggaccaaggttgagatcaaaggagggggcggatcaggcggaggtggatcgggagggggtggtagcgaggtgcagctggtggagtctgggggaggcttggtccagcctggagggtccctgagactctcctgtgcagcctctggattcaccttcgtagaccacgacatggactgggtccgccaggctccagggaaggggctggagtgggttggccgtactagaaacaaactaggaagttacaccacagaatacgccgcgtctgtgaaaggcagattcaccatctcaagagatgattcaaagaactcactgtatctgcaaatgaacagcctgaaaaccgaggacacggcggtgtactactgcgccagagagcctaaatactggatcgacttcgacctatgggggagaggtaccttggtcaccgtctcctca

SEQ ID NO: 907 - DNA, 1278 bp, synthetic construct
  source 1..1278: mol_type = other DNA
cccgctgctctgctgcctgcccggggtaccaacatggcccagaagcgtcctgcctgcaccctgaagcctgagtgtgtccagcagctgctggtttgctcccaggaggccaagaagtcagcctactgcccctacagtcactttcctgtgggggctgccctgctcacccaggaggggagaatcttcaaagggtgcaacatagaaaatgcctgctacccgctgggcatctgtgctgaacggaccgctatccagaaggccgtctcagaagggtacaaggatttcagggcaattgctatcgccagtgacatgcaagatgattttatctctccatgtggggcctgcaggcaagtcatgagagagtttggcaccaactggcccgtgtacatgaccaagccggatggtacgtatattggtggaggcggttcgggtggagggggatctggtggcggaggtagcggtggcgggggatcaggtggcgggggatcaggtggcgggggatcaggtggcgggggatcaggtggcgggggatcaggtggcgggggatcagaggtgcagctgttggagtctgggggaggcttggtacagcctggggggtccctgagactctcctgtgcagcctctggattcacctttagcaattatgccatgagctgggtccgccaggctccagggaaggggctggagtgggtctcagctattagtggtagtggtggtagcacatactacgcagactccgtgaagggccggttcaccatctccagagacaattccaagaacacgctgtatctgcaaatgaacagcctgagagccgaggacacggcggtgtactactgcgccaagggccctcctacataccacacaaactactactacatggacgtatggggcaagggtacaactgtcaccgtctcctcaggagggggcggatcaggcggaggtggatcgggagggggtggtagcgacatccagatgacccagtctccatcttccgtgtctgcatctgtaggagacagagtcaccatcacttgtcgggcgagtcagggtattagcagctggttagcctggtatcagcagaaaccagggaaagcccctaagctcctgatctatgctgcatccagtttgcaaagtggggtcccatcaaggttcagcggcagtggatctgggacagatttcactctcaccatcagcagcctgcagcctgaagattttgcaacttattactgtcagcaaacaaatagtttcccttacacttttggcggagggaccaaggttgagatcaaa

SEQ ID NO: 908 - DNA, 1278 bp, synthetic construct
  source 1..1278: mol_type = other DNA
cccgctgctctgctgcctgcccggggtaccaacatggcccagaagcgtcctgcctgcaccctgaagcctgagtgtgtccagcagctgctggtttgctcccaggaggccaagaagtcagcctactgcccctacagtcactttcctgtgggggctgccctgctcacccaggaggggagaatcttcaaagggtgcaacatagaaaatgcctgctacccgctgggcatctgtgctgaacggaccgctatccagaaggccgtctcagaagggtacaaggatttcagggcaattgctatcgccagtgacatgcaagatgattttatctctccatgtggggcctgcaggcaagtcatgagagagtttggcaccaactggcccgtgtacatgaccaagccggatggtacgtatattggtggaggcggttcgggtggagggggatctggtggcggaggtagcggtggcgggggatcaggtggcgggggatcaggtggcgggggatcaggtggcgggggatcaggtggcgggggatcaggtggcgggggatcagaggtgcagctgttggagtctgggggaggcttggtacagcctggggggtccctgagactctcctgtgcagcctctggattcacctttagcagctatgtcatgatctgggtccgccaggctccagggaaggggctggagtgggtctcaagcattagtggtgacagcgtaacaacatactacgcagactccgtgaagggccggttcaccatctccagagacaattccaagaacacgctgtatctgcaaatgaacagcctgagagccgaggacacggcggtgtactactgcgccaagggccctcctacataccacacaaactactactacatggacgtatggggcaagggtacaactgtcaccgtctcctcaggagggggcggatcaggcggaggtggatcgggagggggtggtagcgacatccagatgacccagtctccatcttccgtgtctgcatctgtaggagacagagtcaccatcacttgtcgggcgagtcagggtattagcagctggttagcctggtatcagcagaaaccagggaaagcccctaagctcctgatctatgctgcatccagtttgcaaagtggggtcccatcaaggttcagcggcagtggatctgggacagatttcactctcaccatcagcagcctgcagcctgaagattttgcaacttattactgtcagcaaacaaatagtttcccttacacttttggcggagggaccaaggttgagatcaaa

SEQ ID NO: 909 - DNA, 1272 bp, synthetic construct
  source 1..1272: mol_type = other DNA
cccgctgctctgctgcctgcccggggtaccaacatggcccagaagcgtcctgcctgcaccctgaagcctgagtgtgtccagcagctgctggtttgctcccaggaggccaagaagtcagcctactgcccctacagtcactttcctgtgggggctgccctgctcacccaggaggggagaatcttcaaagggtgcaacatagaaaatgcctgctacccgctgggcatctgtgctgaacggaccgctatccagaaggccgtctcagaagggtacaaggatttcagggcaattgctatcgccagtgacatgcaagatgattttatctctccatgtggggcctgcaggcaagtcatgagagagtttggcaccaactggcccgtgtacatgaccaagccggatggtacgtatattggtggaggcggttcgggtggagggggatctggtggcggaggtagcggtggcgggggatcaggtggcgggggatcaggtggcgggggatcaggtggcgggggatcaggtggcgggggatcaggtggcgggggatcagaggtgcagctggtggagtctgggggaggcttggtccagcctggagggtccctgagactctcctgtgcagcctctggattcaccttcagtgaccactacatggactgggtccgccaggctccagggaaggggctggagtgggttggccgtactagaaacaaagctagtagttacaccacagaatacgccgcgtctgtgaaaggcagattcaccatctcaagagatgattcaaagaactcactgtatctgcaaatgaacagcctgaaaaccgaggacacggcggtgtactactgcgccagagagcctaaatactggatcgacttcgacctatgggggagaggtaccttggtcaccgtctcctcaggagggggcggatcaggcggaggtggatcgggagggggtggtagcgacatccagatgacccagtctccatcctccctgtctgcatctgtaggagacagagtcaccatcacttgccgggcaagtcagagcattagcagctatttaaattggtatcagcagaaaccagggaaagcccctaagctcctgatctatgctgcatccagtttgcaaagtggggtcccatcaaggttcagtggcagtggatctgggacagatttcactctcaccatcagcagtctgcaacctgaagattttgcaacttactactgtcagcaaagctacatcgccccttacacttttggcggagggaccaaggttgagatcaaa

SEQ ID NO: 910 - DNA, 1245 bp, synthetic construct
  source 1..1245: mol_type = other DNA
cccgctgctctgctgcctgcccggggtaccaacatggcccagaagcgtcctgcctgcaccctgaagcctgagtgtgtccagcagctgctggtttgctcccaggaggccaagaagtcagcctactgcccctacagtcactttcctgtgggggctgccctgctcacccaggaggggagaatcttcaaagggtgcaacatagaaaatgcctgctacccgctgggcatctgtgctgaacggaccgctatccagaaggccgtctcagaagggtacaaggatttcagggcaattgctatcgccagtgacatgcaagatgattttatctctccatgtggggcctgcaggcaagtcatgagagagtttggcaccaactggcccgtgtacatgaccaagccggatggtacgtatattggtggaggcggttcgggtggagggggatctggtggcggaggtagcggtggcgggggatcaggtggcgggggatcaggtggcgggggatcaggtggcgggggatcaggtggcgggggatcaggtggcgggggatcagaggtgcagctggtggagtctgggggaggcttggtacagccagggcggtccctgagactctcctgtacagcttctggattcaccttcagtgaccacgacatgaactgggtccgccaggctccagggaaggggctggagtgggttggccgtactagaaacgccgctggaagttacaccacagaatacgccgcgtctgtgaaaggcagattcaccatctcaagagatgattcaaagaactcactgtatctgcaaatgaacagcctgaaaaccgaggacacggcggtgtactactgcgccagagagcctaaatactggatcgacttcgacctatgggggggagggggcggatcaggcggaggtggatcgggagggggtggtagcgacatccagatgacccagtctccatcctccctgtctgcatctgtaggagacagagtcaccatcacttgccgggcaagtcagagcattagcagctatttaaattggtatcagcagaaaccagggaaagcccctaagctcctgatctatgctgcatccagtttgcaaagtggggtcccatcaaggttcagtggcagtggatctgggacagatttcactctcaccatcagcagtctgcaacctgaagattttgcaacttactactgtcagcaaagctacatcgccccttacacttttggcggagggaccaaggttgagatcaaa

SEQ ID NO: 911 - DNA, 1272 bp, synthetic construct
  source 1..1272: mol_type = other DNA
cccgctgctctgctgcctgcccggggtaccaacatggcccagaagcgtcctgcctgcaccctgaagcctgagtgtgtccagcagctgctggtttgctcccaggaggccaagaagtcagcctactgcccctacagtcactttcctgtgggggctgccctgctcacccaggaggggagaatcttcaaagggtgcaacatagaaaatgcctgctacccgctgggcatctgtgctgaacggaccgctatccagaaggccgtctcagaagggtacaaggatttcagggcaattgctatcgccagtgacatgcaagatgattttatctctccatgtggggcctgcaggcaagtcatgagagagtttggcaccaactggcccgtgtacatgaccaagccggatggtacgtatattggtggaggcggttcgggtggagggggatctggtggcggaggtagcggtggcgggggatcaggtggcgggggatcaggtggcgggggatcaggtggcgggggatcaggtggcgggggatcaggtggcgggggatcagacatccagatgacccagtctccatcctccctgtctgcatctgtaggagacagagtcaccatcacttgccgggcaagtcagagcattagcagctatttaaattggtatcagcagaaaccagggaaagcccctaagctcctgatctatgctgcatccagtttgcaaagtggggtcccatcaaggttcagtggcagtggatgcggtacagatttcactctcaccatcagcagtctgcaacctgaagattttgcaacttactactgtcagcaaagctacatcgccccttacacttttggcggagggaccaaggttgagatcaaaggagggggcggatcaggcggaggtggatcgggagggggtggtagcgaggtgcagctggtggagtctgggggaggcttggtccagcctggagggtccctgagactctcctgtgcagcctctggattcaccttcgtagaccacgacatggactgggtccgccaggctccagggaaggggctggagtgggttggccgtactagaaacaaactaggaagttacaccacagaatacgccgcgtctgtgaaaggcagattcaccatctcaagagatgattcaaagaactcactgtatctgcaaatgaacagcctgaaaaccgaggacacggcggtgtactactgcgccagagagcctaaatactggatcgacttcgacctatgggggagaggtaccttggtcaccgtctcctca

SEQ ID NO: 912 - DNA, 1293 bp, synthetic construct
  source 1..1293: mol_type = other DNA
cccgctgctctgctgcctgcccggggtaccaacatggcccagaagcgtcctgcctgcaccctgaagcctgagtgtgtccagcagctgctggtttgctcccaggaggccaagaagtcagcctactgcccctacagtcactttcctgtgggggctgccctgctcacccaggaggggagaatcttcaaagggtgcaacatagaaaatgcctgctacccgctgggcatctgtgctgaacggaccgctatccagaaggccgtctcagaagggtacaaggatttcagggcaattgctatcgccagtgacatgcaagatgattttatctctccatgtggggcctgcaggcaagtcatgagagagtttggcaccaactggcccgtgtacatgaccaagccggatggtacgtatattggtggaggcggttcgggtggagggggatctggtggcggaggtagcggtggcgggggatcaggtggcgggggatcaggtggcgggggatcaggtggcgggggatcaggtggcgggggatcaggtggcgggggatcaggtggcgggggatcagaggtgcagctgttggagtctgggggaggcttggtacagcctggggggtccctgagactctcctgtgcagcctctggattcacctttagcaattatgccatgagctgggtccgccaggctccagggaaggggctggagtgggtctcagctattagtggtagtggtggtagcacatactacgcagactccgtgaagggccggttcaccatctccagagacaattccaagaacacgctgtatctgcaaatgaacagcctgagagccgaggacacggcggtgtactactgcgccaagggccctcctacataccacacaaactactactacatggacgtatggggcaagggtacaactgtcaccgtctcctcaggagggggcggatcaggcggaggtggatcgggagggggtggtagcgacatccagatgacccagtctccatcttccgtgtctgcatctgtaggagacagagtcaccatcacttgtcgggcgagtcagggtattagcagctggttagcctggtatcagcagaaaccagggaaagcccctaagctcctgatctatgctgcatccagtttgcaaagtggggtcccatcaaggttcagcggcagtggatctgggacagatttcactctcaccatcagcagcctgcagcctgaagattttgcaacttattactgtcagcaaacaaatagtttcccttacacttttggcggagggaccaaggttgagatcaaa

SEQ ID NO: 913 - DNA, 1293 bp, synthetic construct
  source 1..1293: mol_type = other DNA
cccgctgctctgctgcctgcccggggtaccaacatggcccagaagcgtcctgcctgcaccctgaagcctgagtgtgtccagcagctgctggtttgctcccaggaggccaagaagtcagcctactgcccctacagtcactttcctgtgggggctgccctgctcacccaggaggggagaatcttcaaagggtgcaacatagaaaatgcctgctacccgctgggcatctgtgctgaacggaccgctatccagaaggccgtctcagaagggtacaaggatttcagggcaattgctatcgccagtgacatgcaagatgattttatctctccatgtggggcctgcaggcaagtcatgagagagtttggcaccaactggcccgtgtacatgaccaagccggatggtacgtatattggtggaggcggttcgggtggagggggatctggtggcggaggtagcggtggcgggggatcaggtggcgggggatcaggtggcgggggatcaggtggcgggggatcaggtggcgggggatcaggtggcgggggatcaggtggcgggggatcagaggtgcagctgttggagtctgggggaggcttggtacagcctggggggtccctgagactctcctgtgcagcctctggattcacctttagcagctatgtcatgatctgggtccgccaggctccagggaaggggctggagtgggtctcaagcattagtggtgacagcgtaacaacatactacgcagactccgtgaagggccggttcaccatctccagagacaattccaagaacacgctgtatctgcaaatgaacagcctgagagccgaggacacggcggtgtactactgcgccaagggccctcctacataccacacaaactactactacatggacgtatggggcaagggtacaactgtcaccgtctcctcaggagggggcggatcaggcggaggtggatcgggagggggtggtagcgacatccagatgacccagtctccatcttccgtgtctgcatctgtaggagacagagtcaccatcacttgtcgggcgagtcagggtattagcagctggttagcctggtatcagcagaaaccagggaaagcccctaagctcctgatctatgctgcatccagtttgcaaagtggggtcccatcaaggttcagcggcagtggatctgggacagatttcactctcaccatcagcagcctgcagcctgaagattttgcaacttattactgtcagcaaacaaatagtttcccttacacttttggcggagggaccaaggttgagatcaaa

SEQ ID NO: 914 - DNA, 1287 bp, synthetic construct
  source 1..1287: mol_type = other DNA
cccgctgctctgctgcctgcccggggtaccaacatggcccagaagcgtcctgcctgcaccctgaagcctgagtgtgtccagcagctgctggtttgctcccaggaggccaagaagtcagcctactgcccctacagtcactttcctgtgggggctgccctgctcacccaggaggggagaatcttcaaagggtgcaacatagaaaatgcctgctacccgctgggcatctgtgctgaacggaccgctatccagaaggccgtctcagaagggtacaaggatttcagggcaattgctatcgccagtgacatgcaagatgattttatctctccatgtggggcctgcaggcaagtcatgagagagtttggcaccaactggcccgtgtacatgaccaagccggatggtacgtatattggtggaggcggttcgggtggagggggatctggtggcggaggtagcggtggcgggggatcaggtggcgggggatcaggtggcgggggatcaggtggcgggggatcaggtggcgggggatcaggtggcgggggatcaggtggcgggggatcagaggtgcagctggtggagtctgggggaggcttggtccagcctggagggtccctgagactctcctgtgcagcctctggattcaccttcagtgaccactacatggactgggtccgccaggctccagggaaggggctggagtgggttggccgtactagaaacaaagctagtagttacaccacagaatacgccgcgtctgtgaaaggcagattcaccatctcaagagatgattcaaagaactcactgtatctgcaaatgaacagcctgaaaaccgaggacacggcggtgtactactgcgccagagagcctaaatactggatcgacttcgacctatgggggagaggtaccttggtcaccgtctcctcaggagggggcggatcaggcggaggtggatcgggagggggtggtagcgacatccagatgacccagtctccatcctccctgtctgcatctgtaggagacagagtcaccatcacttgccgggcaagtcagagcattagcagctatttaaattggtatcagcagaaaccagggaaagcccctaagctcctgatctatgctgcatccagtttgcaaagtggggtcccatcaaggttcagtggcagtggatctgggacagatttcactctcaccatcagcagtctgcaacctgaagattttgcaacttactactgtcagcaaagctacatcgccccttacacttttggcggagggaccaaggttgagatcaaa

SEQ ID NO: 915 - DNA, 1260 bp, synthetic construct
  source 1..1260: mol_type = other DNA
cccgctgctctgctgcctgcccggggtaccaacatggcccagaagcgtcctgcctgcaccctgaagcctgagtgtgtccagcagctgctggtttgctcccaggaggccaagaagtcagcctactgcccctacagtcactttcctgtgggggctgccctgctcacccaggaggggagaatcttcaaagggtgcaacatagaaaatgcctgctacccgctgggcatctgtgctgaacggaccgctatccagaaggccgtctcagaagggtacaaggatttcagggcaattgctatcgccagtgacatgcaagatgattttatctctccatgtggggcctgcaggcaagtcatgagagagtttggcaccaactggcccgtgtacatgaccaagccggatggtacgtatattggtggaggcggttcgggtggagggggatctggtggcggaggtagcggtggcgggggatcaggtggcgggggatcaggtggcgggggatcaggtggcgggggatcaggtggcgggggatcaggtggcgggggatcaggtggcgggggatcagaggtgcagctggtggagtctgggggaggcttggtacagccagggcggtccctgagactctcctgtacagcttctggattcaccttcagtgaccacgacatgaactgggtccgccaggctccagggaaggggctggagtgggttggccgtactagaaacgccgctggaagttacaccacagaatacgccgcgtctgtgaaaggcagattcaccatctcaagagatgattcaaagaactcactgtatctgcaaatgaacagcctgaaaaccgaggacacggcggtgtactactgcgccagagagcctaaatactggatcgacttcgacctatgggggggagggggcggatcaggcggaggtggatcgggagggggtggtagcgacatccagatgacccagtctccatcctccctgtctgcatctgtaggagacagagtcaccatcacttgccgggcaagtcagagcattagcagctatttaaattggtatcagcagaaaccagggaaagcccctaagctcctgatctatgctgcatccagtttgcaaagtggggtcccatcaaggttcagtggcagtggatctgggacagatttcactctcaccatcagcagtctgcaacctgaagattttgcaacttactactgtcagcaaagctacatcgccccttacacttttggcggagggaccaaggttgagatcaaa

SEQ ID NO: 916 - DNA, 1287 bp, synthetic construct
  source 1..1287: mol_type = other DNA
cccgctgctctgctgcctgcccggggtaccaacatggcccagaagcgtcctgcctgcaccctgaagcctgagtgtgtccagcagctgctggtttgctcccaggaggccaagaagtcagcctactgcccctacagtcactttcctgtgggggctgccctgctcacccaggaggggagaatcttcaaagggtgcaacatagaaaatgcctgctacccgctgggcatctgtgctgaacggaccgctatccagaaggccgtctcagaagggtacaaggatttcagggcaattgctatcgccagtgacatgcaagatgattttatctctccatgtggggcctgcaggcaagtcatgagagagtttggcaccaactggcccgtgtacatgaccaagccggatggtacgtatattggtggaggcggttcgggtggagggggatctggtggcggaggtagcggtggcgggggatcaggtggcgggggatcaggtggcgggggatcaggtggcgggggatcaggtggcgggggatcaggtggcgggggatcaggtggcgggggatcagacatccagatgacccagtctccatcctccctgtctgcatctgtaggagacagagtcaccatcacttgccgggcaagtcagagcattagcagctatttaaattggtatcagcagaaaccagggaaagcccctaagctcctgatctatgctgcatccagtttgcaaagtggggtcccatcaaggttcagtggcagtggatgcggtacagatttcactctcaccatcagcagtctgcaacctgaagattttgcaacttactactgtcagcaaagctacatcgccccttacacttttggcggagggaccaaggttgagatcaaaggagggggcggatcaggcggaggtggatcgggagggggtggtagcgaggtgcagctggtggagtctgggggaggcttggtccagcctggagggtccctgagactctcctgtgcagcctctggattcaccttcgtagaccacgacatggactgggtccgccaggctccagggaaggggctggagtgggttggccgtactagaaacaaactaggaagttacaccacagaatacgccgcgtctgtgaaaggcagattcaccatctcaagagatgattcaaagaactcactgtatctgcaaatgaacagcctgaaaaccgaggacacggcggtgtactactgcgccagagagcctaaatactggatcgacttcgacctatgggggagaggtaccttggtcaccgtctcctca

SEQ ID NO: 917 - DNA, 1308 bp, synthetic construct
  source 1..1308: mol_type = other DNA
cccgctgctctgctgcctgcccggggtaccaacatggcccagaagcgtcctgcctgcaccctgaagcctgagtgtgtccagcagctgctggtttgctcccaggaggccaagaagtcagcctactgcccctacagtcactttcctgtgggggctgccctgctcacccaggaggggagaatcttcaaagggtgcaacatagaaaatgcctgctacccgctgggcatctgtgctgaacggaccgctatccagaaggccgtctcagaagggtacaaggatttcagggcaattgctatcgccagtgacatgcaagatgattttatctctccatgtggggcctgcaggcaagtcatgagagagtttggcaccaactggcccgtgtacatgaccaagccggatggtacgtatattggtggaggcggttcgggtggagggggatctggtggcggaggtagcggtggcgggggatcaggtggcgggggatcaggtggcgggggatcaggtggcgggggatcaggtggcgggggatcaggtggcgggggatcaggtggcgggggatcaggtggcgggggatcagaggtgcagctgttggagtctgggggaggcttggtacagcctggggggtccctgagactctcctgtgcagcctctggattcacctttagcaattatgccatgagctgggtccgccaggctccagggaaggggctggagtgggtctcagctattagtggtagtggtggtagcacatactacgcagactccgtgaagggccggttcaccatctccagagacaattccaagaacacgctgtatctgcaaatgaacagcctgagagccgaggacacggcggtgtactactgcgccaagggccctcctacataccacacaaactactactacatggacgtatggggcaagggtacaactgtcaccgtctcctcaggagggggcggatcaggcggaggtggatcgggagggggtggtagcgacatccagatgacccagtctccatcttccgtgtctgcatctgtaggagacagagtcaccatcacttgtcgggcgagtcagggtattagcagctggttagcctggtatcagcagaaaccagggaaagcccctaagctcctgatctatgctgcatccagtttgcaaagtggggtcccatcaaggttcagcggcagtggatctgggacagatttcactctcaccatcagcagcctgcagcctgaagattttgcaacttattactgtcagcaaacaaatagtttcccttacacttttggcggagggaccaaggttgagatcaaa

SEQ ID NO: 918 - DNA, 1308 bp, synthetic construct
  source 1..1308: mol_type = other DNA
cccgctgctctgctgcctgcccggggtaccaacatggcccagaagcgtcctgcctgcaccctgaagcctgagtgtgtccagcagctgctggtttgctcccaggaggccaagaagtcagcctactgcccctacagtcactttcctgtgggggctgccctgctcacccaggaggggagaatcttcaaagggtgcaacatagaaaatgcctgctacccgctgggcatctgtgctgaacggaccgctatccagaaggccgtctcagaagggtacaaggatttcagggcaattgctatcgccagtgacatgcaagatgattttatctctccatgtggggcctgcaggcaagtcatgagagagtttggcaccaactggcccgtgtacatgaccaagccggatggtacgtatattggtggaggcggttcgggtggagggggatctggtggcggaggtagcggtggcgggggatcaggtggcgggggatcaggtggcgggggatcaggtggcgggggatcaggtggcgggggatcaggtggcgggggatcaggtggcgggggatcaggtggcgggggatcagaggtgcagctgttggagtctgggggaggcttggtacagcctggggggtccctgagactctcctgtgcagcctctggattcacctttagcagctatgtcatgatctgggtccgccaggctccagggaaggggctggagtgggtctcaagcattagtggtgacagcgtaacaacatactacgcagactccgtgaagggccggttcaccatctccagagacaattccaagaacacgctgtatctgcaaatgaacagcctgagagccgaggacacggcggtgtactactgcgccaagggccctcctacataccacacaaactactactacatggacgtatggggcaagggtacaactgtcaccgtctcctcaggagggggcggatcaggcggaggtggatcgggagggggtggtagcgacatccagatgacccagtctccatcttccgtgtctgcatctgtaggagacagagtcaccatcacttgtcgggcgagtcagggtattagcagctggttagcctggtatcagcagaaaccagggaaagcccctaagctcctgatctatgctgcatccagtttgcaaagtggggtcccatcaaggttcagcggcagtggatctgggacagatttcactctcaccatcagcagcctgcagcctgaagattttgcaacttattactgtcagcaaacaaatagtttcccttacacttttggcggagggaccaaggttgagatcaaa

SEQ ID NO: 919 - DNA, 1302 bp, synthetic construct
  source 1..1302: mol_type = other DNA
cccgctgctctgctgcctgcccggggtaccaacatggcccagaagcgtcctgcctgcaccctgaagcctgagtgtgtccagcagctgctggtttgctcccaggaggccaagaagtcagcctactgcccctacagtcactttcctgtgggggctgccctgctcacccaggaggggagaatcttcaaagggtgcaacatagaaaatgcctgctacccgctgggcatctgtgctgaacggaccgctatccagaaggccgtctcagaagggtacaaggatttcagggcaattgctatcgccagtgacatgcaagatgattttatctctccatgtggggcctgcaggcaagtcatgagagagtttggcaccaactggcccgtgtacatgaccaagccggatggtacgtatattggtggaggcggttcgggtggagggggatctggtggcggaggtagcggtggcgggggatcaggtggcgggggatcaggtggcgggggatcaggtggcgggggatcaggtggcgggggatcaggtggcgggggatcaggtggcgggggatcaggtggcgggggatcagaggtgcagctggtggagtctgggggaggcttggtccagcctggagggtccctgagactctcctgtgcagcctctggattcaccttcagtgaccactacatggactgggtccgccaggctccagggaaggggctggagtgggttggccgtactagaaacaaagctagtagttacaccacagaatacgccgcgtctgtgaaaggcagattcaccatctcaagagatgattcaaagaactcactgtatctgcaaatgaacagcctgaaaaccgaggacacggcggtgtactactgcgccagagagcctaaatactggatcgacttcgacctatgggggagaggtaccttggtcaccgtctcctcaggagggggcggatcaggcggaggtggatcgggagggggtggtagcgacatccagatgacccagtctccatcctccctgtctgcatctgtaggagacagagtcaccatcacttgccgggcaagtcagagcattagcagctatttaaattggtatcagcagaaaccagggaaagcccctaagctcctgatctatgctgcatccagtttgcaaagtggggtcccatcaaggttcagtggcagtggatctgggacagatttcactctcaccatcagcagtctgcaacctgaagattttgcaacttactactgtcagcaaagctacatcgccccttacacttttggcggagggaccaaggttgagatcaaa

SEQ ID NO: 920 - DNA, 1275 bp, synthetic construct
  source 1..1275: mol_type = other DNA
cccgctgctctgctgcctgcccggggtaccaacatggcccagaagcgtcctgcctgcaccctgaagcctgagtgtgtccagcagctgctggtttgctcccaggaggccaagaagtcagcctactgcccctacagtcactttcctgtgggggctgccctgctcacccaggaggggagaatcttcaaagggtgcaacatagaaaatgcctgctacccgctgggcatctgtgctgaacggaccgctatccagaaggccgtctcagaagggtacaaggatttcagggcaattgctatcgccagtgacatgcaagatgattttatctctccatgtggggcctgcaggcaagtcatgagagagtttggcaccaactggcccgtgtacatgaccaagccggatggtacgtatattggtggaggcggttcgggtggagggggatctggtggcggaggtagcggtggcgggggatcaggtggcgggggatcaggtggcgggggatcaggtggcgggggatcaggtggcgggggatcaggtggcgggggatcaggtggcgggggatcaggtggcgggggatcagaggtgcagctggtggagtctgggggaggcttggtacagccagggcggtccctgagactctcctgtacagcttctggattcaccttcagtgaccacgacatgaactgggtccgccaggctccagggaaggggctggagtgggttggccgtactagaaacgccgctggaagttacaccacagaatacgccgcgtctgtgaaaggcagattcaccatctcaagagatgattcaaagaactcactgtatctgcaaatgaacagcctgaaaaccgaggacacggcggtgtactactgcgccagagagcctaaatactggatcgacttcgacctatgggggggagggggcggatcaggcggaggtggatcgggagggggtggtagcgacatccagatgacccagtctccatcctccctgtctgcatctgtaggagacagagtcaccatcacttgccgggcaagtcagagcattagcagctatttaaattggtatcagcagaaaccagggaaagcccctaagctcctgatctatgctgcatccagtttgcaaagtggggtcccatcaaggttcagtggcagtggatctgggacagatttcactctcaccatcagcagtctgcaacctgaagattttgcaacttactactgtcagcaaagctacatcgccccttacacttttggcggagggaccaaggttgagatcaaa

SEQ ID NO: 921 - DNA, 1302 bp, synthetic construct
  source 1..1302: mol_type = other DNA
cccgctgctctgctgcctgcccggggtaccaacatggcccagaagcgtcctgcctgcaccctgaagcctgagtgtgtccagcagctgctggtttgctcccaggaggccaagaagtcagcctactgcccctacagtcactttcctgtgggggctgccctgctcacccaggaggggagaatcttcaaagggtgcaacatagaaaatgcctgctacccgctgggcatctgtgctgaacggaccgctatccagaaggccgtctcagaagggtacaaggatttcagggcaattgctatcgccagtgacatgcaagatgattttatctctccatgtggggcctgcaggcaagtcatgagagagtttggcaccaactggcccgtgtacatgaccaagccggatggtacgtatattggtggaggcggttcgggtggagggggatctggtggcggaggtagcggtggcgggggatcaggtggcgggggatcaggtggcgggggatcaggtggcgggggatcaggtggcgggggatcaggtggcgggggatcaggtggcgggggatcaggtggcgggggatcagacatccagatgacccagtctccatcctccctgtctgcatctgtaggagacagagtcaccatcacttgccgggcaagtcagagcattagcagctatttaaattggtatcagcagaaaccagggaaagcccctaagctcctgatctatgctgcatccagtttgcaaagtggggtcccatcaaggttcagtggcagtggatgcggtacagatttcactctcaccatcagcagtctgcaacctgaagattttgcaacttactactgtcagcaaagctacatcgccccttacacttttggcggagggaccaaggttgagatcaaaggagggggcggatcaggcggaggtggatcgggagggggtggtagcgaggtgcagctggtggagtctgggggaggcttggtccagcctggagggtccctgagactctcctgtgcagcctctggattcaccttcgtagaccacgacatggactgggtccgccaggctccagggaaggggctggagtgggttggccgtactagaaacaaactaggaagttacaccacagaatacgccgcgtctgtgaaaggcagattcaccatctcaagagatgattcaaagaactcactgtatctgcaaatgaacagcctgaaaaccgaggacacggcggtgtactactgcgccagagagcctaaatactggatcgacttcgacctatgggggagaggtaccttggtcaccgtctcctca

SEQ ID NO: 922 - DNA, 1323 bp, synthetic construct
  source 1..1323: mol_type = other DNA
cccgctgctctgctgcctgcccggggtaccaacatggcccagaagcgtcctgcctgcaccctgaagcctgagtgtgtccagcagctgctggtttgctcccaggaggccaagaagtcagcctactgcccctacagtcactttcctgtgggggctgccctgctcacccaggaggggagaatcttcaaagggtgcaacatagaaaatgcctgctacccgctgggcatctgtgctgaacggaccgctatccagaaggccgtctcagaagggtacaaggatttcagggcaattgctatcgccagtgacatgcaagatgattttatctctccatgtggggcctgcaggcaagtcatgagagagtttggcaccaactggcccgtgtacatgaccaagccggatggtacgtatattggtggaggcggttcgggtggagggggatctggtggcggaggtagcggtggcgggggatcaggtggcgggggatcaggtggcgggggatcaggtggcgggggatcaggtggcgggggatcaggtggcgggggatcaggtggcgggggatcaggtggcgggggatcaggtggcgggggatcagaggtgcagctgttggagtctgggggaggcttggtacagcctggggggtccctgagactctcctgtgcagcctctggattcacctttagcaattatgccatgagctgggtccgccaggctccagggaaggggctggagtgggtctcagctattagtggtagtggtggtagcacatactacgcagactccgtgaagggccggttcaccatctccagagacaattccaagaacacgctgtatctgcaaatgaacagcctgagagccgaggacacggcggtgtactactgcgccaagggccctcctacataccacacaaactactactacatggacgtatggggcaagggtacaactgtcaccgtctcctcaggagggggcggatcaggcggaggtggatcgggagggggtggtagcgacatccagatgacccagtctccatcttccgtgtctgcatctgtaggagacagagtcaccatcacttgtcgggcgagtcagggtattagcagctggttagcctggtatcagcagaaaccagggaaagcccctaagctcctgatctatgctgcatccagtttgcaaagtggggtcccatcaaggttcagcggcagtggatctgggacagatttcactctcaccatcagcagcctgcagcctgaagattttgcaacttattactgtcagcaaacaaatagtttcccttacacttttggcggagggaccaaggttgagatcaaa

SEQ ID NO: 923 - DNA, 1323 bp, synthetic construct
  source 1..1323: mol_type = other DNA
cccgctgctctgctgcctgcccggggtaccaacatggcccagaagcgtcctgcctgcaccctgaagcctgagtgtgtccagcagctgctggtttgctcccaggaggccaagaagtcagcctactgcccctacagtcactttcctgtgggggctgccctgctcacccaggaggggagaatcttcaaagggtgcaacatagaaaatgcctgctacccgctgggcatctgtgctgaacggaccgctatccagaaggccgtctcagaagggtacaaggatttcagggcaattgctatcgccagtgacatgcaagatgattttatctctccatgtggggcctgcaggcaagtcatgagagagtttggcaccaactggcccgtgtacatgaccaagccggatggtacgtatattggtggaggcggttcgggtggagggggatctggtggcggaggtagcggtggcgggggatcaggtggcgggggatcaggtggcgggggatcaggtggcgggggatcaggtggcgggggatcaggtggcgggggatcaggtggcgggggatcaggtggcgggggatcaggtggcgggggatcagaggtgcagctgttggagtctgggggaggcttggtacagcctggggggtccctgagactctcctgtgcagcctctggattcacctttagcagctatgtcatgatctgggtccgccaggctccagggaaggggctggagtgggtctcaagcattagtggtgacagcgtaacaacatactacgcagactccgtgaagggccggttcaccatctccagagacaattccaagaacacgctgtatctgcaaatgaacagcctgagagccgaggacacggcggtgtactactgcgccaagggccctcctacataccacacaaactactactacatggacgtatggggcaagggtacaactgtcaccgtctcctcaggagggggcggatcaggcggaggtggatcgggagggggtggtagcgacatccagatgacccagtctccatcttccgtgtctgcatctgtaggagacagagtcaccatcacttgtcgggcgagtcagggtattagcagctggttagcctggtatcagcagaaaccagggaaagcccctaagctcctgatctatgctgcatccagtttgcaaagtggggtcccatcaaggttcagcggcagtggatctgggacagatttcactctcaccatcagcagcctgcagcctgaagattttgcaacttattactgtcagcaaacaaatagtttcccttacacttttggcggagggaccaaggttgagatcaaa

SEQ ID NO: 924 - DNA, 1317 bp, synthetic construct
  source 1..1317: mol_type = other DNA
cccgctgctctgctgcctgcccggggtaccaacatggcccagaagcgtcctgcctgcaccctgaagcctgagtgtgtccagcagctgctggtttgctcccaggaggccaagaagtcagcctactgcccctacagtcactttcctgtgggggctgccctgctcacccaggaggggagaatcttcaaagggtgcaacatagaaaatgcctgctacccgctgggcatctgtgctgaacggaccgctatccagaaggccgtctcagaagggtacaaggatttcagggcaattgctatcgccagtgacatgcaagatgattttatctctccatgtggggcctgcaggcaagtcatgagagagtttggcaccaactggcccgtgtacatgaccaagccggatggtacgtatattggtggaggcggttcgggtggagggggatctggtggcggaggtagcggtggcgggggatcaggtggcgggggatcaggtggcgggggatcaggtggcgggggatcaggtggcgggggatcaggtggcgggggatcaggtggcgggggatcaggtggcgggggatcaggtggcgggggatcagaggtgcagctggtggagtctgggggaggcttggtccagcctggagggtccctgagactctcctgtgcagcctctggattcaccttcagtgaccactacatggactgggtccgccaggctccagggaaggggctggagtgggttggccgtactagaaacaaagctagtagttacaccacagaatacgccgcgtctgtgaaaggcagattcaccatctcaagagatgattcaaagaactcactgtatctgcaaatgaacagcctgaaaaccgaggacacggcggtgtactactgcgccagagagcctaaatactggatcgacttcgacctatgggggagaggtaccttggtcaccgtctcctcaggagggggcggatcaggcggaggtggatcgggagggggtggtagcgacatccagatgacccagtctccatcctccctgtctgcatctgtaggagacagagtcaccatcacttgccgggcaagtcagagcattagcagctatttaaattggtatcagcagaaaccagggaaagcccctaagctcctgatctatgctgcatccagtttgcaaagtggggtcccatcaaggttcagtggcagtggatctgggacagatttcactctcaccatcagcagtctgcaacctgaagattttgcaacttactactgtcagcaaagctacatcgccccttacacttttggcggagggaccaaggttgagatcaaa

SEQ ID NO: 925 - DNA, 1290 bp, synthetic construct
  source 1..1290: mol_type = other DNA
cccgctgctctgctgcctgcccggggtaccaacatggcccagaagcgtcctgcctgcaccctgaagcctgagtgtgtccagcagctgctggtttgctcccaggaggccaagaagtcagcctactgcccctacagtcactttcctgtgggggctgccctgctcacccaggaggggagaatcttcaaagggtgcaacatagaaaatgcctgctacccgctgggcatctgtgctgaacggaccgctatccagaaggccgtctcagaagggtacaaggatttcagggcaattgctatcgccagtgacatgcaagatgattttatctctccatgtggggcctgcaggcaagtcatgagagagtttggcaccaactggcccgtgtacatgaccaagccggatggtacgtatattggtggaggcggttcgggtggagggggatctggtggcggaggtagcggtggcgggggatcaggtggcgggggatcaggtggcgggggatcaggtggcgggggatcaggtggcgggggatcaggtggcgggggatcaggtggcgggggatcaggtggcgggggatcaggtggcgggggatcagaggtgcagctggtggagtctgggggaggcttggtacagccagggcggtccctgagactctcctgtacagcttctggattcaccttcagtgaccacgacatgaactgggtccgccaggctccagggaaggggctggagtgggttggccgtactagaaacgccgctggaagttacaccacagaatacgccgcgtctgtgaaaggcagattcaccatctcaagagatgattcaaagaactcactgtatctgcaaatgaacagcctgaaaaccgaggacacggcggtgtactactgcgccagagagcctaaatactggatcgacttcgacctatgggggggagggggcggatcaggcggaggtggatcgggagggggtggtagcgacatccagatgacccagtctccatcctccctgtctgcatctgtaggagacagagtcaccatcacttgccgggcaagtcagagcattagcagctatttaaattggtatcagcagaaaccagggaaagcccctaagctcctgatctatgctgcatccagtttgcaaagtggggtcccatcaaggttcagtggcagtggatctgggacagatttcactctcaccatcagcagtctgcaacctgaagattttgcaacttactactgtcagcaaagctacatcgccccttacacttttggcggagggaccaaggttgagatcaaa

SEQ ID NO: 926 - DNA, 1317 bp, synthetic construct
  source 1..1317: mol_type = other DNA
cccgctgctctgctgcctgcccggggtaccaacatggcccagaagcgtcctgcctgcaccctgaagcctgagtgtgtccagcagctgctggtttgctcccaggaggccaagaagtcagcctactgcccctacagtcactttcctgtgggggctgccctgctcacccaggaggggagaatcttcaaagggtgcaacatagaaaatgcctgctacccgctgggcatctgtgctgaacggaccgctatccagaaggccgtctcagaagggtacaaggatttcagggcaattgctatcgccagtgacatgcaagatgattttatctctccatgtggggcctgcaggcaagtcatgagagagtttggcaccaactggcccgtgtacatgaccaagccggatggtacgtatattggtggaggcggttcgggtggagggggatctggtggcggaggtagcggtggcgggggatcaggtggcgggggatcaggtggcgggggatcaggtggcgggggatcaggtggcgggggatcaggtggcgggggatcaggtggcgggggatcaggtggcgggggatcaggtggcgggggatcagacatccagatgacccagtctccatcctccctgtctgcatctgtaggagacagagtcaccatcacttgccgggcaagtcagagcattagcagctatttaaattggtatcagcagaaaccagggaaagcccctaagctcctgatctatgctgcatccagtttgcaaagtggggtcccatcaaggttcagtggcagtggatgcggtacagatttcactctcaccatcagcagtctgcaacctgaagattttgcaacttactactgtcagcaaagctacatcgccccttacacttttggcggagggaccaaggttgagatcaaaggagggggcggatcaggcggaggtggatcgggagggggtggtagcgaggtgcagctggtggagtctgggggaggcttggtccagcctggagggtccctgagactctcctgtgcagcctctggattcaccttcgtagaccacgacatggactgggtccgccaggctccagggaaggggctggagtgggttggccgtactagaaacaaactaggaagttacaccacagaatacgccgcgtctgtgaaaggcagattcaccatctcaagagatgattcaaagaactcactgtatctgcaaatgaacagcctgaaaaccgaggacacggcggtgtactactgcgccagagagcctaaatactggatcgacttcgacctatgggggagaggtaccttggtcaccgtctcctca
